(19) United States
(12) Patent Application Publication
(10) Pub. No.: US 2005/0075304 A1
(43) Pub. Date: Apr. 7, 2005

(54) RNA interference mediated inhibition of vascular endothelial growth factor and vascular endothelial growth factor receptor gene expression using short interfering nucleic acid (siNA)

(76) Inventors: James McSwiggen, Boulder, CO (US); Leonid Beigleman, Longmont, CO (US); Pamela Pavco, Lafayette, CO (US)

Correspondence Address: MCDONNELL BOEHNEN HULBERT & BERGHOFF LLP, 300 S. WACKER DRIVE, 32ND FLOOR, CHICAGO, IL, 60606, US

(21) Appl. No.: 10/758,155

(22) Filed: Jan. 12, 2004

Related U.S. Application Data
(63) Continuation-in-part of application No. 10/665,951, filed on Sep. 18, 2003.
Application No. 10/665,951 is a continuation-in-part of application No. 10/665,255, filed on Sep. 16, 2003.
Application No. 10/665,255 is a continuation-in-part of application No. PCT/US03/05022, filed on Feb. 20, 2003.
Application No. 10/665,255 is a continuation-in-part of application No. 10/306,747, filed on Nov. 27, 2002.
Application No. PCT/US03/05022 is a continuation-in-part of application No. 10/287,949, filed on Nov. 4, 2002.
Application No. 10/287,949 is a continuation-in-part of application No. PCT/US02/17674, filed on May 29, 2002.
(60) Provisional application No. 60/358,580, filed on Feb. 20, 2002.
(60) Provisional application No. 60/363,124, filed on Mar. 11, 2002.
(60) Provisional application No. 60/386,782, filed on Jun. 6, 2002.
(60) Provisional application No. 60/393,796, filed on Jul. 3, 2002.
(60) Provisional application No. 60/399,348, filed on Jul. 29, 2002.
(60) Provisional application No. 60/406,784, filed on Aug. 29, 2002.
(60) Provisional application No. 60/408,378, filed on Sep. 5, 2002.
(60) Provisional application No. 60/409,293, filed on Sep. 9, 2002.
(60) Provisional application No. 60/440,129, filed on Jan. 15, 2003.
(60) Provisional application No. 60/334,461, filed on Nov. 30, 2001.

(51) Int. Cl. A61K 48/00; C07H 21/02

(52) U.S. Cl. 514/44; 536/23.1

(57) ABSTRACT

The present invention concerns methods and reagents useful in modulating vascular endothelial growth factor (VEGF, VEGF-A, VEGF-B, VEGF-C, VEGF-D) and/or vascular endothelial growth factor receptor (e.g., VEGFr1, VEGFr2 and/or VEGFr3) gene expression in a variety of applications, including use in therapeutic, diagnostic, target validation, and genomic discovery applications. Specifically, the invention relates to small nucleic acid molecules, such as short interfering nucleic acid (siNA), short interfering RNA (siRNA), double-stranded RNA (dsRNA), micro-RNA (miRNA), and short hairpin RNA (shRNA) molecules capable of mediating RNA interference (RNAi) against VEGF and/or VEGFr gene expression and/or activity. The small nucleic acid molecules are useful in the diagnosis and treatment of cancer, proliferative diseases, and any other disease or condition that responds to modulation of VEGF and/or VEGFr expression or activity.

[0001] This application is a continuation-in-part of McSwiggen, filed on Sep. 18, 2003, U.S. Ser. No. 10/665,951 which is a continuation-in-part of McSwiggen, filed on Sep. 16, 2003, U.S. Ser. No. 10/665,255, which is a continuation-in-part of McSwiggen, PCT/US03/05022, filed Feb. 20, 2003, which claims the benefit of Beigelman U.S. Ser. No. 60/358,580 filed Feb. 20, 2002, of Beigelman U.S. Ser. No. 60/363,124 filed Mar. 11, 2002, of Beigelman U.S. Ser. No. 60/386,782 filed Jun. 6, 2002, of McSwiggen, U.S. Ser. No. 60/393,796 filed Jul. 3, 2002, of McSwiggen, U.S. Ser. No. 60/399,348 filed Jul. 29, 2002, of Beigelman U.S. Ser. No. 60/406,784 filed Aug. 29, 2002, of Beigelman U.S. Ser. No. 60/408,378 filed Sep. 5, 2002, of Beigelman U.S. Ser. No. 60/409,293 filed Sep. 9, 2002, and of Beigelman U.S. Ser. No. 60/440,129 filed Jan. 15, 2003, and which is a continuation-in-part of Pavco, U.S. Ser. No. 10/306,747, filed Nov. 27, 2002, which claims the benefit of Pavco U.S. Ser. No. 60/334,461, filed Nov. 30, 2001, a continuation-in-part of Pavco, U.S. Ser. No. 10/287,949 filed Nov. 4, 2002, and a continuation-in-part of Pavco, PCT/US02/17674 filed May 29, 2002. The instant application claims priority to all of the listed applications, which are hereby incorporated by reference herein in their entireties, including the drawings.

### FIELD OF THE INVENTION

[0002] The present invention concerns compounds, compositions, and methods for the study, diagnosis, and treatment of conditions and diseases that respond to the modulation of vascular endothelial growth factor (VEGF) and/or vascular endothelial growth factor receptor (e.g., VEGFr1, VEGFr2 and/or VEGFr3) gene expression and/or activity. The present invention also concerns compounds, compositions, and methods relating to conditions and diseases that respond to the modulation of expression and/or activity of genes involved in VEGF and VEGF receptor pathways. Specifically, the invention relates to small nucleic acid molecules, such as short interfering nucleic acid (siNA), short interfering RNA (siRNA), double-stranded RNA (dsRNA), micro-RNA (miRNA), and short hairpin RNA (shRNA) molecules capable of mediating RNA interference (RNAi) against VEGF and VEGF receptor gene expression.

### BACKGROUND OF THE INVENTION

[0003] The following is a discussion of relevant art pertaining to RNAi. The discussion is provided only for understanding of the invention that follows. The summary is not an admission that any of the work described below is prior art to the claimed invention.

[0004] RNA interference refers to the process of sequence-specific post-transcriptional gene silencing in animals mediated by short interfering RNAs (siRNAs) (Fire et al., 1998, Nature, 391, 806; Hamilton et al., 1999, Science, 286, 950-951). The corresponding process in plants is commonly referred to as post-transcriptional gene silencing or RNA silencing and is also referred to as quelling in fungi. The process of post-transcriptional gene silencing is thought to be an evolutionarily-conserved cellular defense mechanism used to prevent the expression of foreign genes and is commonly shared by diverse flora and phyla (Fire et al., 1999, Trends Genet., 15, 358). Such protection from foreign gene expression may have evolved in response to the production of double-stranded RNAs (dsRNAs) derived from viral infection or from the random integration of transposon elements into a host genome via a cellular response that specifically destroys homologous single-stranded RNA or viral genomic RNA. The presence of dsRNA in cells triggers the RNAi response though a mechanism that has yet to be fully characterized. This mechanism appears to be different from the interferon response that results from dsRNA-mediated activation of protein kinase PKR and 2′,5′-oligoadenylate synthetase resulting in non-specific cleavage of mRNA by ribonuclease L.

[0005] The presence of long dsRNAs in cells stimulates the activity of a ribonuclease III enzyme referred to as dicer. Dicer is involved in the processing of the dsRNA into short pieces of dsRNA known as short interfering RNAs (siRNAs) (Hamilton et al., supra; Berstein et al., 2001, Nature, 409, 363). Short interfering RNAs derived from dicer activity are typically about 21 to about 23 nucleotides in length and comprise about 19 base pair duplexes (Hamilton et al., supra; Elbashir et al., 2001, Genes Dev., 15, 188). Dicer has also been implicated in the excision of 21- and 22-nucleotide small temporal RNAs (stRNAs) from precursor RNA of conserved structure that are implicated in translational control (Hutvagner et al., 2001, Science, 293, 834). The RNAi response also features an endonuclease complex, commonly referred to as an RNA-induced silencing complex (RISC), which mediates cleavage of single-stranded RNA having sequence complementary to the antisense strand of the siRNA duplex. Cleavage of the target RNA takes place in the middle of the region complementary to the antisense strand of the siRNA duplex (Elbashir et al., 2001, Genes Dev., 15, 188).

[0006] RNAi has been studied in a variety of systems. Fire et al., 1998, Nature, 391, 806, were the first to observe RNAi in C. elegans. Bahramian and Zarbl, 1999, Molecular and Cellular Biology, 19, 274-283 and Wianny and Goetz, 1999, Nature Cell Biol., 2, 70, describe RNAi mediated by dsRNA in mammalian systems. Hammond et al., 2000, Nature, 404, 293, describe RNAi in Drosophila cells transfected with dsRNA. Elbashir et al., 2001, Nature, 411, 494, describe RNAi induced by introduction of duplexes of synthetic 21-nucleotide RNAs in cultured mammalian cells including human embryonic kidney and HeLa cells. Recent work in Drosophila embryonic lysates (Elbashir et al., 2001, EMBO J, 20, 6877) has revealed certain requirements for siRNA length, structure, chemical composition, and sequence that are essential to mediate efficient RNAi activity. These studies have shown that 21-nucleotide siRNA duplexes are most active when containing 3′-terminal dinucleotide overhangs. Furthermore, complete substitution of one or both siRNA strands with 2′-deoxy (2′-H) or 2′-O-methyl nucleotides abolishes RNAi activity, whereas substitution of the 3′-terminal siRNA overhang nucleotides with 2′-deoxy nucleotides (2′-H) was shown to be tolerated. Single mismatch sequences in the center of the siRNA duplex were also shown to abolish RNAi activity. In addition, these studies also indicate that the position of the cleavage site in the target RNA is defined by the 5′-end of the siRNA guide sequence rather than the 3′-end of the guide sequence (Elbashir et al., 2001, EMBO J, 20, 6877). Other studies have indicated that a 5′-phosphate on the target-complementary strand of a siRNA duplex is required for siRNA activity and that ATP is utilized to maintain the 5′-phosphate moiety on the siRNA (Nykanen et al., 2001, Cell, 107, 309).

[0007] Studies have shown that replacing the 3′-terminal nucleotide overhanging segments of a 21-mer siRNA duplex having two nucleotide 3′-overhangs with deoxyribonucleotides does not have an adverse effect on RNAi activity. Replacing up to four nucleotides on each end of the siRNA with deoxyribonucleotides has been reported to be well tolerated, whereas complete substitution with deoxyribonucleotides results in no RNAi activity (Elbashir et al., 2001, EMBO J., 20, 6877). In addition, Elbashir et al., supra, also report that substitution of siRNA with 2′-O-methyl nucleotides completely abolishes RNAi activity. Li et al., International PCT Publication No. WO 00/44914, and Beach et al., International PCT Publication No. WO 01/68836 preliminarily suggest that siRNA may include modifications to either the phosphate-sugar backbone or the nucleoside to include at least one of a nitrogen or sulfur heteroatom, however, neither application postulates to what extent such modifications would be tolerated in siRNA molecules, nor provides any further guidance or examples of such modified siRNA. Kreutzer et al., Canadian Patent Application No. 2,359,180, also describe certain chemical modifications for use in dsRNA constructs in order to counteract activation of double-stranded RNA-dependent protein kinase PKR, specifically 2′-amino or 2′-O-methyl nucleotides, and nucleotides containing a 2′-O or 4′-C methylene bridge. However, Kreutzer et al. similarly fails to provide examples or guidance as to what extent these modifications would be tolerated in siRNA molecules.

[0008] Parrish et al., 2000, Molecular Cell, 6, 1977-1087, tested certain chemical modifications targeting the unc-22 gene in C. elegans using long (>25 nt) siRNA transcripts. The authors describe the introduction of thiophosphate residues into these siRNA transcripts by incorporating thiophosphate nucleotide analogs with T7 and T3 RNA polymerase and observed that RNAs with two phosphorothioate modified bases also had substantial decreases in effectiveness as RNAi. Further, Parrish et al. reported that phosphorothioate modification of more than two residues greatly destabilized the RNAs in vitro such that interference activities could not be assayed. Id. at 1081. The authors also tested certain modifications at the 2′-position of the nucleotide sugar in the long siRNA transcripts and found that substituting deoxynucleotides for ribonucleotides produced a substantial decrease in interference activity, especially in the case of Uridine to Thymidine and/or Cytidine to deoxy-Cytidine substitutions. Id. In addition, the authors tested certain base modifications, including substituting, in sense and antisense strands of the siRNA, 4-thiouracil, 5-bromouracil, 5-iodouracil, and 3-(aminoallyl)uracil for uracil, and inosine for guanosine. Whereas 4-thiouracil and 5-bromouracil substitution appeared to be tolerated, Parrish reported that inosine produced a substantial decrease in interference activity when incorporated in either strand. Parrish also reported that incorporation of 5-iodouracil and 3-(aminoallyl)uracil in the antisense strand resulted in a substantial decrease in RNAi activity as well.

[0009] The use of longer dsRNA has been described. For example, Beach et al., International PCT Publication No. WO 01/68836, describes specific methods for attenuating gene expression using endogenously-derived dsRNA. Tuschl et al., International PCT Publication No. WO 01/75164, describe a Drosophila in vitro RNAi system and the use of specific siRNA molecules for certain functional genomic and certain therapeutic applications; although Tuschl, 2001, Chem. Biochem., 2, 239-245, doubts that RNAi can be used to cure genetic diseases or viral infection due to the danger of activating interferon response. Li et al., International PCT Publication No. WO 00/44914, describe the use of specific dsRNAs for attenuating the expression of certain target genes. Zernicka-Goetz et al., International PCT Publication No. WO 01/36646, describe certain methods for inhibiting the expression of particular genes in mammalian cells using certain dsRNA molecules. Fire et al., International PCT Publication No. WO 99/32619, describe particular methods for introducing certain dsRNA molecules into cells for use in inhibiting gene expression. Plaetinck et al., International PCT Publication No. WO 00/01846, describe certain methods for identifying specific genes responsible for conferring a particular phenotype in a cell using specific dsRNA molecules. Mello et al., International PCT Publication No. WO 01/29058, describe the identification of specific genes involved in dsRNA-mediated RNAi. Deschamps Depaillette et al., International PCT Publication No. WO 99/07409, describe specific compositions consisting of particular dsRNA molecules combined with certain anti-viral agents. Waterhouse et al., International PCT Publication No. 99/53050, describe certain methods for decreasing the phenotypic expression of a nucleic acid in plant cells using certain dsRNAs. Driscoll et al., International PCT Publication No. WO 01/49844, describe specific DNA constructs for use in facilitating gene silencing in targeted organisms.

[0010] Others have reported on various RNAi and gene-silencing systems. For example, Parrish et al., 2000, Molecular Cell, 6, 1977-1087, describe specific chemically-modified siRNA constructs targeting the unc-22 gene of C. elegans. Grossniklaus, International PCT Publication No. WO 01/38551, describes certain methods for regulating polycomb gene expression in plants using certain dsRNAs. Churikov et al., International PCT Publication No. WO 01/42443, describe certain methods for modifying genetic characteristics of an organism using certain dsRNAs. Cogoni et al., International PCT Publication No. WO 01/53475, describe certain methods for isolating a Neurospora silencing gene and uses thereof. Reed et al., International PCT Publication No. WO 01/68836, describe certain methods for gene silencing in plants. Honer et al., International PCT Publication No. WO 01/70944, describe certain methods of drug screening using transgenic nematodes as Parkinson's Disease models using certain dsRNAs. Deak et al., International PCT Publication No. WO 01/72774, describe certain Drosophila-derived gene products that may be related to RNAi in Drosophila. Arndt et al., International PCT Publication No. WO 01/92513 describe certain methods for mediating gene suppression by using factors that enhance RNAi. Tuschl et al., International PCT Publication No. WO 02/44321, describe certain synthetic siRNA constructs. Pachuk et al., International PCT Publication No. WO 00/63364, and Satishchandran et al., International PCT Publication No. WO 01/04313, describe certain methods and compositions for inhibiting the function of certain polynucleotide sequences using certain dsRNAs. Echeverri et al., International PCT Publication No. WO 02/38805, describe certain C. elegans genes identified via RNAi. Kreutzer et al., International PCT Publications Nos. WO 02/055692, WO 02/055693, and EP 1144623 B1 describes certain methods for inhibiting gene expression using RNAi. Graham et al., International PCT Publications Nos. WO 99/49029 and WO 01/70949, and AU 4037501 describe certain vector expressed siRNA molecules. Fire et al., U.S. Pat. No. 6,506,559, describe certain methods for inhibiting gene expression in vitro using certain long dsRNA (greater than 25 nucleotide) constructs that mediate RNAi. Harborth et al., 2003, Antisense & Nucleic Acid Drug Development, 13, 83-105, describe certain chemically and structurally modified siRNA molecules. Chiu and Rana, 2003, RNA, 9, 1034-1048, describe certain chemically and structurally modified siRNA molecules. Reich et al., 2003, Molecular Vision, 9, 210-216, describe certain short interfering RNAs targeting VEGF in a mouse model of neovascularization.

### SUMMARY OF THE INVENTION

[0011] This invention relates to compounds, compositions, and methods useful for modulating the expression of genes, such as those genes associated with angiogenesis and proliferation, using short interfering nucleic acid (siNA) molecules. This invention also relates to compounds, compositions, and methods useful for modulating the expression and activity of vascular endothelial growth factor (VEGF) and/or vascular endothelial growth factor receptor (e.g., VEGFr1, VEGFr2, VEGFr3) genes, or genes involved in VEGF and/or VEGFr pathways of gene expression and/or VEGF activity by RNA interference (RNAi) using small nucleic acid molecules. In particular, the instant invention features small nucleic acid molecules, such as short interfering nucleic acid (siNA), short interfering RNA (siRNA), double-stranded RNA (dsRNA), micro-RNA (miRNA), and short hairpin RNA (shRNA) molecules and methods used to modulate the expression of VEGF and/or VEGFr genes. A siNA of the invention can be unmodified or chemically-modified. A siNA of the instant invention can be chemically synthesized, expressed from a vector or enzymatically synthesized. The instant invention also features various chemically-modified synthetic short interfering nucleic acid (siNA) molecules capable of modulating VEGF and/or VEGFr gene expression or activity in cells by RNA interference (RNAi). The use of chemically-modified siNA improves various properties of native siNA molecules through increased resistance to nuclease degradation in vivo and/or through improved cellular uptake. Further, contrary to earlier published studies, siNA having multiple chemical modifications retains its RNAi activity. The siNA molecules of the instant invention provide useful reagents and methods for a variety of therapeutic, diagnostic, target validation, genomic discovery, genetic engineering, and pharmacogenomic applications.

[0012] In one embodiment, the invention features one or more siNA molecules and methods that independently or in combination modulate the expression of gene(s) encoding proteins, such as vascular endothelial growth factor (VEGF) and/or vascular endothelial growth factor receptors (e.g., VEGFr1, VEGFr2, VEGFr3), associated with the maintenance and/or development of cancer and other proliferative diseases, such as genes encoding sequences comprising those sequences referred to by GenBank Accession Nos. shown in Table I, referred to herein generally as VEGF and/or VEGFr. The description below of the various aspects and embodiments of the invention is provided with reference to the exemplary VEGF and VEGFr (e.g., VEGFr1, VEGFr2, VEGFr3) genes referred to herein as VEGF and VEGFr respectively. However, the various aspects and embodiments are also directed to other VEGF and/or VEGFr genes, such as mutant VEGF and/or VEGFr genes, splice variants of VEGF and/or VEGFr genes, other VEGF and/or VEGFr ligands and receptors. The various aspects and embodiments are also directed to other genes that are involved in VEGF and/or VEGFr mediated pathways of signal transduction or gene expression that are involved in the progression, development, and/or maintenance of disease (e.g., cancer). These additional genes can be analyzed for target sites using the methods described for VEGF and/or VEGFr genes herein. Thus, the modulation of other genes and the effects of such modulation of the other genes can be performed, determined, and measured as described herein.

[0013] In one embodiment, the invention features a double-stranded short interfering nucleic acid (siNA) molecule that down-regulates expression of a vascular endothelial growth factor (e.g., VEGF, VEGF-A, VEGF-B, VEGF-C, VEGF-D) gene, wherein said siNA molecule comprises about 19 to about 21 base pairs.

[0014] In one embodiment, the invention features a double-stranded short interfering nucleic acid (siNA) molecule that down-regulates expression of a vascular endothelial growth factor receptor (e.g., VEGFr1, VEGFr2, and/or VEGFr3) gene, wherein said siNA molecule comprises about 19 to about 21 base pairs.

[0015] In one embodiment, the invention features a siNA molecule that down-regulates expression of a VEGF gene, for example, wherein the VEGF gene comprises VEGF encoding sequence.

[0016] In one embodiment, the invention features a siNA molecule that down-regulates expression of a VEGFr gene, for example, wherein the VEGFr gene comprises VEGFr encoding sequence.

[0017] In one embodiment, the invention features a siNA molecule having RNAi activity against VEGF and/or VEGFr RNA, wherein the siNA molecule comprises a sequence complementary to any RNA having VEGF and/or VEGFr or other VEGF and/or VEGFr encoding sequence, such as those sequences having GenBank Accession Nos. shown in Table I. In another embodiment, the invention features a siNA molecule having RNAi activity against VEGF and/or VEGFr RNA, wherein the siNA molecule comprises a sequence complementary to an RNA having other VEGF and/or VEGFr encoding sequence, for example mutant VEGF and/or VEGFr genes, splice variants of VEGF and/or VEGFr genes, variants of VEGF and/or VEGFr genes with conservative substitutions, and homologous VEGF and/or VEGFr ligands and receptors. Chemical modifications as shown in Tables III and IV or otherwise described herein can be applied to any siNA construct of the invention.

[0018] In one embodiment, the invention features a siNA molecule having RNAi activity against VEGF and/or VEGFr RNA, wherein the siNA molecule comprises a sequence complementary to any RNA having VEGF and/or VEGFr encoding sequence, such as those sequences having VEGF and/or VEGFr GenBank Accession Nos. shown in Table I. In another embodiment, the invention features a siNA molecule having RNAi activity against VEGF and/or VEGFr RNA, wherein the siNA molecule comprises a sequence complementary to an RNA having other VEGF and/or VEGFr encoding sequence, for example, mutant VEGF and/or VEGFr genes, splice variants of VEGF and/or VEGFr genes, VEGF and/or VEGFr variants with conservative substitutions, and homologous VEGF and/or VEGFr ligands and receptors. Chemical modifications as shown in Tables III and IV or otherwise described herein can be applied to any siNA construct of the invention.

[0019] In another embodiment, the invention features a siNA molecule having RNAi activity against a VEGF and/or VEGFr gene, wherein the siNA molecule comprises nucleotide sequence complementary to nucleotide sequence of a VEGF and/or VEGFr gene, such as those VEGF and/or VEGFr sequences having GenBank Accession Nos. shown in Table I or other VEGF and/or VEGFr encoding sequence, such as mutant VEGF and/or VEGFr genes, splice variants of VEGF and/or VEGFr genes, variants with conservative substitutions, and homologous VEGF and/or VEGFr ligands and receptors. In another embodiment, a siNA molecule of the invention includes nucleotide sequence that can interact with nucleotide sequence of a VEGF and/or VEGFr gene and thereby mediate silencing of VEGF and/or VEGFr gene expression, for example, wherein the siNA mediates regulation of VEGF and/or VEGFr gene expression by cellular processes that modulate the chromatin structure of the VEGF and/or VEGFr gene and prevent transcription of the VEGF and/or VEGFr gene.

[0020] In one embodiment, siNA molecules of the invention are used to down regulate or inhibit the expression of soluble VEGF receptors (e.g. sVEGFr1 or sVEGFr2). Analysis of soluble VEGF receptor levels can be used to identify subjects with certain cancer types. These cancers can be amenable to treatment, for example, treatment with siNA molecules of the invention and any other chemotherapeutic composition. As such, analysis of soluble VEGF receptor levels can be used to determine treatment type and the course of therapy in treating a subject. Monitoring of soluble VEGF receptor levels can be used to predict treatment outcome and to determine the efficacy of compounds and compositions that modulate the level and/or activity of VEGF receptors (see for example Pavco U.S. Ser. No. 10/438,493, incorporated by reference herein in its entirety including the drawings).

[0021] In another embodiment, the invention features a siNA molecule comprising nucleotide sequence, for example, nucleotide sequence in the antisense region of the siNA molecule that is complementary to a nucleotide sequence or portion of sequence of a VEGF and/or VEGFr gene. In another embodiment, the invention features a siNA molecule comprising a region, for example, the antisense region of the siNA construct, complementary to a sequence comprising a VEGF and/or VEGFr gene sequence or a portion thereof.

[0022] In one embodiment, the antisense region of VEGFr1 siNA constructs can comprise a sequence complementary to sequence having any of SEQ ID NOs. 1-427, 1997-2000, 2009-2012, or 2244-2255. In one embodiment, the antisense region can also comprise sequence having any of SEQ ID NOs. 428-854, 2024-2027, 2032-2035, 2040-2043, 2188-2190, 2197-2200, 2203, 2217, 2278-2280, 2292-2298, 2313-2318, 2326-2332, 2347-2364, 2444-2448, 2451-2452, 2455-2456, 2564, 2566, 2568, or 2571. In another embodiment, the sense region of VEGFr1 constructs can comprise sequence having any of SEQ ID NOs. 1-427, 1997-2000, 2009-2012, 2020-2023, 2028-2031, 2036-2039, 2185-2187, 2201-2202, 2218, 2220, 2222, 2224, 2244-2255, 2275-2277, 2281-2291, 2299-2305, 2319-2325, 2333-2339, 2347-2364, 2438-2439, 2449-2450, 2563, 2565, 2567, 2569, or 2570. The sense region can comprise a sequence of SEQ ID NO. 2554 and the antisense region can comprise a sequence of SEQ ID NO. 2555. The sense region can comprise a sequence of SEQ ID NO. 2556 and the antisense region can comprise a sequence of SEQ ID NO. 2557. The sense region can comprise a sequence of SEQ ID NO. 2558 and the antisense region can comprise a sequence of SEQ ID NO. 2559. The sense region can comprise a sequence of SEQ ID NO. 2560 and the antisense region can comprise a sequence of SEQ ID NO. 2557. The sense region can comprise a sequence of SEQ ID NO. 2561 and the antisense region can comprise a sequence of SEQ ID NO. 2557. The sense region can comprise a sequence of SEQ ID NO. 2560 and the antisense region can comprise a sequence of SEQ ID NO. 2562.

[0023] In one embodiment, the antisense region of VEGFr2 siNA constructs can comprise a sequence complementary to sequence having any of SEQ ID NOs. 855-1178, 2001-2004, or 2017-2019 or 2256-2271. In one embodiment, the antisense region can also comprise sequence having any of SEQ ID NOs. 1179-1502, 2048-2051, 2056-2059, 2064-2067, 2208-2210, 2214-2216, 2226-2227, 2230-2231, 2377-2388, 2391-2392, 2401-2405, 2420-2423, 2498-2501, or 2506-2509. In another embodiment, the sense region of VEGFr2 constructs can comprise sequence having any of SEQ ID NOs. 855-1178, 2001-2004, 2017-2019, 2256-2271, 2044-2047, 2052-2055, 2060-2063, 2205-2207, 2211-2213, 2228-2229, 2365-2376, 2389-2390, 2393-2394, 2397-2400, 2406-2410, 2416-2419, 2424-2427, 2494-2497, or 2502-2505. The sense region can comprise a sequence of SEQ ID NO. 2438 and the antisense region can comprise a sequence of SEQ ID NO. 2439. The sense region can comprise a sequence of SEQ ID NO. 2554 and the antisense region can comprise a sequence of SEQ ID NO. 2555. The sense region can comprise a sequence of SEQ ID NO. 2556 and the antisense region can comprise a sequence of SEQ ID NO. 2557. The sense region can comprise a sequence of SEQ ID NO. 2558 and the antisense region can comprise a sequence of SEQ ID NO. 2559. The sense region can comprise a sequence of SEQ ID NO. 2560 and the antisense region can comprise a sequence of SEQ ID NO. 2557. The sense region can comprise a sequence of SEQ ID NO. 2561 and the antisense region can comprise a sequence of SEQ ID NO. 2557. The sense region can comprise a sequence of SEQ ID NO. 2560 and the antisense region can comprise a sequence of SEQ ID NO. 2562.

[0024] In one embodiment, the antisense region of VEGFr3 siNA constructs can comprise a sequence complementary to sequence having any of SEQ ID NOs. 1503-1749, 2005-2008, or 2272-2274. In one embodiment, the antisense region can also comprise sequence having any of SEQ ID NOs. 1750-1996, 2072-2075, 2080-2083, 2088-2091, 2435-2437, or 2534-2548. In another embodiment, the sense region of VEGFr3 constructs can comprise sequence having any of SEQ ID NOs. 1503-1749, 2005-2008, 2068-2071, 2076-2079, or 2084-2087, 2272-2274, 2432-2434, 2440-2443, or 2526-2533. The sense region can comprise a sequence of SEQ ID NO. 2554 and the antisense region can comprise a sequence of SEQ ID NO. 2555. The sense region can comprise a sequence of SEQ ID NO. 2556 and the antisense region can comprise a sequence of SEQ ID NO. 2557. The sense region can comprise a sequence of SEQ ID NO. 2558 and the antisense region can comprise a sequence of SEQ ID NO. 2559. The sense region can comprise a sequence of SEQ ID NO. 2560 and the antisense region can comprise a sequence of SEQ ID NO. 2557. The sense region can comprise a sequence of SEQ ID NO. 2561 and the antisense region can comprise a sequence of SEQ ID NO. 2557. The sense region can comprise a sequence of SEQ ID NO. 2560 and the antisense region can comprise a sequence of SEQ ID NO. 2562.

[0025] In one embodiment, a siNA molecule of the invention comprises any of SEQ ID NOs. 1-2562. The sequences shown in SEQ ID NOs: 1-2562 are not limiting. A siNA molecule of the invention can comprise any contiguous VEGF and/or VEGFr sequence (e.g., about 19 to about 25, or about 19, 20, 21, 22, 23, 24 or 25 contiguous VEGF and/or VEGFr nucleotides).

[0026] In yet another embodiment, the invention features a siNA molecule comprising a sequence, for example, the antisense sequence of the siNA construct, complementary to a sequence or portion of sequence comprising sequence represented by GenBank Accession Nos. shown in Table I. Chemical modifications in Tables III and IV and described herein can be applied to any siRNA costruct of the invention.

[0027] In one embodiment of the invention a siNA molecule comprises an antisense strand having about 19 to about 29 (e.g., about 19, 20, 21, 22, 23, 24, 25, 26, 27, 28, or 29) nucleotides, wherein the antisense strand is complementary to a RNA sequence encoding a VEGF and/or VEGFr protein, and wherein said siNA further comprises a sense strand having about 19 to about 29 (e.g., about 19, 20, 21, 22, 23, 24, 25, 26, 27, 28 or 29) nucleotides, and wherein said sense strand and said antisense strand are distinct nucleotide sequences with at least about 19 complementary nucleotides.

[0028] In another embodiment of the invention a siNA molecule of the invention comprises an antisense region having about 19 to about 29 (e.g., about 19, 20, 21, 22, 23, 24, 25, 26, 27, 28 or 29) nucleotides, wherein the antisense region is complementary to a RNA sequence encoding a VEGF and/or VEGFr protein, and wherein said siNA further comprises a sense region having about 19 to about 29 (e.g., about 19, 20, 21, 22, 23, 24, 25, 26, 27, 28, 29 or more) nucleotides, wherein said sense region and said antisense region comprise a linear molecule with at least about 19 complementary nucleotides.

[0029] In one embodiment of the invention a siNA molecule comprises an antisense strand comprising a nucleotide sequence that is complementary to a nucleotide sequence or a portion thereof encoding a VEGF and/or VEGFr protein. The siNA further comprises a sense strand, wherein said sense strand comprises a nucleotide sequence of a VEGF and/or VEGFr gene or a portion thereof.

[0030] In another embodiment, a siNA molecule comprises an antisense region comprising a nucleotide sequence that is complementary to a nucleotide sequence encoding a VEGF and/or VEGFr protein or a portion thereof. The siNA molecule further comprises a sense region, wherein said sense region comprises a nucleotide sequence of a VEGF and/or VEGFr gene or a portion thereof.

[0031] In one embodiment, a siNA molecule of the invention has RNAi activity that modulates expression of RNA encoded by a VEGFr gene. Because VEGFr genes can share some degree of sequence homology with each other, siNA molecules can be designed to target a class of VEGFr genes (and associated receptor or ligand genes) or alternately specific VEGFr genes by selecting sequences that are either shared amongst different VEGFr targets or alternatively that are unique for a specific VEGFr target. Therefore, in one embodiment, the siNA molecule can be designed to target conserved regions of VEGFr RNA sequence having homology between several VEGFr genes so as to target several VEGFr genes (e.g., VEGFr1, VEGFr2 and/or VEGFr3, different VEGFr isoforms, splice variants, mutant genes etc.) with one siNA molecule. In one embodiment, the siNA molecule can be designed to target conserved regions of VEGFr1 and VEGFr2 RNA sequence having shared sequence homology (see for example Table III). Accordingly, in one embodiment, the siNA molecule of the invention modulates the expression of more than one VEGFr gene, i.e., VEGFr1, VEGFr2, and VEGFr3, or any combination thereof. In another embodiment, the siNA molecule can be designed to target a sequence that is unique to a specific VEGFr RNA sequence due to the high degree of specificity that the siNA molecule requires to mediate RNAi activity

[0032] In one embodiment, a siNA molecule of the invention has RNAi activity that modulates expression of RNA encoded by a VEGF gene. Because VEGF genes can share some degree of sequence homology with each other, siNA molecules can be designed to target a class of VEGF genes (and associated receptor or ligand genes) or alternately specific VEGF genes by selecting sequences that are either shared amongst different VEGF targets or alternatively that are unique for a specific VEGF target. Therefore, in one embodiment, the siNA molecule can be designed to target conserved regions of VEGF RNA sequence having homology between several VEGF genes so as to target several VEGF genes (e.g., VEGF-A, VEGF-B, VEGF-C and/or VEGF-D, different VEGF isoforms, splice variants, mutant genes etc.) with one siNA molecule. Accordingly, in one embodiment, the siNA molecule of the invention modulates the expression of more than one VEGF gene, i.e., VEGF-A, VEGF-B, VRGF-C, and VEGF-D or any combination thereof. In another embodiment, the siNA molecule can be designed to target a sequence that is unique to a specific VEGF RNA sequence due to the high degree of specificity that the siNA molecule requires to mediate RNAi activity.

[0033] In one embodiment, a siNA molecule of the invention targeting one or more VEGF receptor genes (e.g., VEGFr1, VEGFr2, and/or VEGFr3) is used in combination with a siNA molecule of the invention targeting a VEGF gene (e.g., VEGF-A, VEGF-B, VEGF-C and/or VEGF-D) according to a use described herein, such as treating a subject with an angiogenesis or neovascularaization related disease, such as tumor angiogenesis and cancer, including but not limited to breast cancer, lung cancer (including non-small cell lung carcinoma), prostate cancer, colorectal cancer, brain cancer, esophageal cancer, bladder cancer, pancreatic cancer, cervical cancer, head and neck cancer, skin cancers, nasopharyngeal carcinoma, liposarcoma, epithelial carcinoma, renal cell carcinoma, gallbladder adeno carcinoma, parotid adenocarcinoma, ovarian cancer, melanoma, lymphoma, glioma, endometrial sarcoma, multidrug resistant cancers, diabetic retinopathy, macular degeneration, neovascular glaucoma, myopic degeneration, arthritis, psoriasis, endometriosis, female reproduction, verruca vulgaris, angiofibroma of tuberous sclerosis, pot-wine stains, Sturge Weber syndrome, Kippel-Trenaunay-Weber syndrome, Osler-Weber-Rendu syndrome, renal disease such as Autosomal dominant polycystic kidney disease (ADPKD), and any other diseases or conditions that are related to or will respond to the levels of VEGF, VEGFr1, and VEGFr2 in a cell or tissue, alone or in combination with other therapies.

[0034] In another embodiment, a siNA molecule of the invention that targets homologous VEGFr1 and VEGFr2 sequence is used in combination with a siNA molecule that targets VEGF-A according to a use described herein, such as treating a subject with an angiogenesis or neovascularaization related disease such as tumor angiogenesis and cancer, including but not limited to breast cancer, lung cancer (including non-small cell lung carcinoma), prostate cancer, colorectal cancer, brain cancer, esophageal cancer, bladder cancer, pancreatic cancer, cervical cancer, head and neck cancer, skin cancers, nasopharyngeal carcinoma, liposarcoma, epithelial carcinoma, renal cell carcinoma, gallbladder adeno carcinoma, parotid adenocarcinoma, ovarian cancer, melanoma, lymphoma, glioma, endometrial sarcoma, multidrug resistant cancers, diabetic retinopathy, macular degeneration, neovascular glaucoma, myopic degeneration, arthritis, psoriasis, endometriosis, female reproduction, verruca vulgaris, angiofibroma of tuberous sclerosis, pot-wine stains, Sturge Weber syndrome, Kippel-Trenaunay-Weber syndrome, Osler-Weber-Rendu syndrome, renal disease such as Autosomal dominant polycystic kidney disease (ADPKD), and any other diseases or conditions that are related to or will respond to the levels of VEGF, VEGFr1, and VEGFr2 in a cell or tissue, alone or in combination with other therapies.

[0035] In one embodiment, a siNA of the invention is used to inhibit the expression of VEGFr1, VEGFr2, and/or VEGFr3 genes, wherein the VEGFr1, VEGFr2, and/or VEGFr3 sequences share sequence homology. Such homologous sequences can be identified as is known in the art, for example using sequence alignments. siNA molecules can be designed to target such homologous sequences, for example using perfectly complementary sequences or by incorporating mismatches and/or wobble base pairs that can provide additional target sequences One advantage of using siNAs of the invention is that a single siNA can be designed to include nucleic acid sequence that is complementary to the nucleotide sequence that is conserved between the VEGF receptors (i.e., VEGFr1, VEGFr2, and/or VEGFr3) such that the siNA can interact with RNAs of the receptors and mediate RNAi to achieve inhibition of expression of the VEGF receptors. In this approach, a single siNA can be used to inhibit expression of more than one VEGF receptor instead of using more than one siNA molecule to target the different receptors.

[0036] In one embodiment, the invention features a method of designing a single siNA to inhibit the expression of both VEGFr1 and VEGFr2 genes comprising designing an siNA having nucleotide sequence that is complementary to nucleotide sequence encoded by or present in both VEGFr1 and VEGFr2 genes or a portion thereof, wherein the siNA mediates RNAi to inhibit the expression of both VEGFr1 and VEGFr2 genes. For example, a single siNA can inhibit the expression of two genes by binding to conserved or homologous sequence present in RNA encoded by VEGFr1 and VEGFr2 genes or a portion thereof.

[0037] In one embodiment, the invention features a method of designing a single siNA to inhibit the expression of both VEGFr1 and VEGFr3 genes comprising designing an siNA having nucleotide sequence that is complementary to nucleotide sequence encoded by or present in both VEGFr1 and VEGFr3 genes or a portion thereof, wherein the siNA mediates RNAi to inhibit the expression of both VEGFr1 and VEGFr3 genes. For example, a single siNA can inhibit the expression of two genes by binding to conserved or homologous sequence present in RNA encoded by VEGFr1 and VEGFr3 genes or a portion thereof.

[0038] In one embodiment, the invention features a method of designing a single siNA to inhibit the expression of both VEGFr2 and VEGFr3 genes comprising designing an siNA having nucleotide sequence that is complementary to nucleotide sequence encoded by or present in both VEGFr2 and VEGFr3 genes or a portion thereof, wherein the siNA mediates RNAi to inhibit the expression of both VEGFr2 and VEGFr3 genes. For example, a single siNA can inhibit the expression of two genes by binding to conserved or homologous sequence present in RNA encoded by VEGFr2 and VEGFr3 genes or a portion thereof.

[0039] In one embodiment, the invention features a method of designing a single siNA to inhibit the expression of VEGFr1, VEGFr2 and VEGFr3 genes comprising designing an siNA having nucleotide sequence that is complementary to nucleotide sequence encoded by or present in VEGFr1, VEGFr2 and VEGFr3 genes or a portion thereof, wherein the siNA mediates RNAi to inhibit the expression of VEGFr1, VEGFr2 and VEGFr3 genes. For example, a single siNA can inhibit the expression of two genes by binding to conserved or homologous sequence present in RNA encoded by VEGFr1, VEGFr2 and VEGFr3 genes or a portion thereof.

[0040] In one embodiment, nucleic acid molecules of the invention that act as mediators of the RNA interference gene silencing response are double-stranded nucleic acid molecules. In another embodiment, the siNA molecules of the invention consist of duplexes containing about 19 base pairs between oligonucleotides comprising about 19 to about 25 (e.g., about 19, 20, 21, 22, 23, 24 or 25) nucleotides. In yet another embodiment, siNA molecules of the invention comprise duplexes with overhanging ends of about about 1 to about 3 (e.g., about 1, 2, or 3) nucleotides, for example, about 21-nucleotide duplexes with about 19 base pairs and 3′-terminal mononucleotide, dinucleotide, or trinucleotide overhangs.

[0041] In one embodiment, the invention features one or more chemically-modified siNA constructs having specificity for VEGF and/or VEGFr expressing nucleic acid molecules, such as RNA encoding a VEGF and/or VEGFr protein. Non-limiting examples of such chemical modifications include without limitation phosphorothioate internucleotide linkages, 2′-deoxyribonucleotides, 2′-O-methyl ribonucleotides, 2′-deoxy-2′-fluoro ribonucleotides, “universal base” nucleotides, “acyclic” nucleotides, 5-C-methyl nucleotides, and terminal glyceryl and/or inverted deoxy abasic residue incorporation. These chemical modifications, when used in various siNA constructs, are shown to preserve RNAi activity in cells while at the same time, dramatically increasing the serum stability of these compounds. Furthermore, contrary to the data published by Parrish et al., supra, applicant demonstrates that multiple (greater than one) phosphorothioate substitutions are well-tolerated and confer substantial increases in serum stability for modified siNA constructs.

[0042] In one embodiment, a siNA molecule of the invention comprises modified nucleotides while maintaining the ability to mediate RNAi. The modified nucleotides can be used to improve in vitro or in vivo characteristics such as stability, activity, and/or bioavailability. For example, a siNA molecule of the invention can comprise modified nucleotides as a percentage of the total number of nucleotides present in the siNA molecule. As such, a siNA molecule of the invention can generally comprise about 5% to about 100% modified nucleotides (e.g., 5%, 10%, 15%, 20%, 25%, 30%, 35%, 40%, 45%, 50%, 55%, 60%, 65%, 70%, 75%, 80%, 85%, 90%, 95% or 100% modified nucleotides). The actual percentage of modified nucleotides present in a given siNA molecule will depend on the total number of nucleotides present in the siNA. If the siNA molecule is single stranded, the percent modification can be based upon the total number of nucleotides present in the single stranded siNA molecules. Likewise, if the siNA molecule is double stranded, the percent modification can be based upon the total number of nucleotides present in the sense strand, antisense strand, or both the sense and antisense strands.

[0043] One aspect of the invention features a double-stranded short interfering nucleic acid (siNA) molecule that down-regulates expression of a VEGF and/or VEGFr gene. In one embodiment, a double stranded siNA molecule comprises one or more chemical modifications and each strand of the double-stranded siNA is about 21 nucleotides long. In one embodiment, the double-stranded siNA molecule does not contain any ribonucleotides. In another embodiment, the double-stranded siNA molecule comprises one or more ribonucleotides. In one embodiment, each strand of the double-stranded siNA molecule comprises about 19 to about 23 (e.g., about 19, 20, 21, 22, 23, 24, 25, 26, 27, 28, or 29) nucleotides, wherein each strand comprises about 19 nucleotides that are complementary to the nucleotides of the other strand. In one embodiment, one of the strands of the double-stranded siNA molecule comprises a nucleotide sequence that is complementary to a nucleotide sequence or a portion thereof of the VEGF and/or VEGFr gene, and the second strand of the double-stranded siNA molecule comprises a nucleotide sequence substantially similar to the nucleotide sequence of the VEGF and/or VEGFr gene or a portion thereof.

[0044] In another embodiment, the invention features a double-stranded short interfering nucleic acid (siNA) molecule that down-regulates expression of a VEGF and/or VEGFr gene comprising an antisense region, wherein the antisense region comprises a nucleotide sequence that is complementary to a nucleotide sequence of the VEGF and/or VEGFr gene or a portion thereof, and a sense region, wherein the sense region comprises a nucleotide sequence substantially similar to the nucleotide sequence of the VEGF and/or VEGFr gene or a portion thereof. In one embodiment, the antisense region and the sense region each comprise about 19 to about 23 (e.g. about 19, 20, 21, 22, or 23) nucleotides, wherein the antisense region comprises about 19 nucleotides that are complementary to nucleotides of the sense region.

[0045] In another embodiment, the invention features a double-stranded short interfering nucleic acid (siNA) molecule that down-regulates expression of a VEGF and/or VEGFr gene comprising a sense region and an antisense region, wherein the antisense region comprises a nucleotide sequence that is complementary to a nucleotide sequence of RNA encoded by the VEGF and/or VEGFr gene or a portion thereof and the sense region comprises a nucleotide sequence that is complementary to the antisense region.

[0046] In one embodiment, a siNA molecule of the invention comprises blunt ends, i.e., ends that do not include any overhanging nucleotides. For example, a siNA molecule of the invention comprising modifications described herein (e.g., comprising nucleotides having Formulae I-VII or siNA constructs comprising Stab 1-Stab 18 or any combination thereof) and/or any length described herein can comprise blunt ends or ends with no overhanging nucleotides.

[0047] In one embodiment, any siNA molecule of the invention can comprise one or more blunt ends, i.e. where a blunt end does not have any overhanging nucleotides. In a non-limiting example, a blunt ended siNA molecule has a number of base pairs equal to the number of nucleotides present in each strand of the siNA molecule. In another example, a siNA molecule comprises one blunt end, for example wherein the 5′-end of the antisense strand and the 3′-end of the sense strand do not have any overhanging nucleotides. In another example, a siNA molecule comprises one blunt end, for example wherein the 3′-end of the antisense strand and the 5′-end of the sense strand do not have any overhanging nucleotides. In another example, a siNA molecule comprises two blunt ends, for example wherein the 3′-end of the antisense strand and the 5′-end of the sense strand as well as the 5′-end of the antisense strand and 3′-end of the sense strand do not have any overhanging nucleotides. A blunt ended siNA molecule can comprise, for example, from about 18 to about 30 nucleotides (e.g., about 18, 19, 20, 21, 22, 23, 24, 25, 26, 27, 28, 29, or 30 nucleotides). Other nucleotides present in a blunt ended siNA molecule can comprise mismatches, bulges, loops, or wobble base pairs, for example, to modulate the activity of the siNA molecule to mediate RNA interference.

[0048] By “blunt ends” is meant symmetric termini or termini of a double stranded siNA molecule having no overhanging nucleotides. The two strands of a double stranded siNA molecule align with each other without over-hanging nucleotides at the termini. For example, a blunt ended siNA construct comprises terminal nucleotides that are complementary between the sense and antisense regions of the siNA molecule.

[0049] In one embodiment, the invention features a double-stranded short interfering nucleic acid (siNA) molecule that down-regulates expression of a VEGF and/or VEGFr gene, wherein the siNA molecule is assembled from two separate oligonucleotide fragments wherein one fragment comprises the sense region and the second fragment comprises the antisense region of the siNA molecule. The sense region can be connected to the antisense region via a linker molecule, such as a polynucleotide linker or a non-nucleotide linker.

[0050] In one embodiment, the invention features a double-stranded short interfering nucleic acid (siNA) molecule that down-regulates expression of a VEGF and/or VEGFr gene comprising a sense region and an antisense region, wherein the antisense region comprises a nucleotide sequence that is complementary to a nucleotide sequence of RNA encoded by the VEGF and/or VEGFr gene or a portion thereof and the sense region comprises a nucleotide sequence that is complementary to the antisense region, and wherein the siNA molecule has one or more modified pyrimidine and/or purine nucleotides. In one embodiment, the pyrimidine nucleotides in the sense region are 2′-O-methylpyrimidine nucleotides or 2′-deoxy-2′-fluoro pyrimidine nucleotides and the purine nucleotides present in the sense region are 2′-deoxy purine nucleotides. In another embodiment, the pyrimidine nucleotides in the sense region are 2′-deoxy-2′-fluoro pyrimidine nucleotides and the purine nucleotides present in the sense region are 2′-O-methyl purine nucleotides. In another embodiment, the pyrimidine nucleotides in the sense region are 2′-deoxy-2′-fluoro pyrimidine nucleotides and the purine nucleotides present in the sense region are 2′-deoxy purine nucleotides. In one embodiment, the pyrimidine nucleotides in the antisense region are 2′-deoxy-2′-fluoro pyrimidine nucleotides and the purine nucleotides present in the antisense region are 2′-O-methyl or 2′-deoxy purine nucleotides. In another embodiment of any of the above-described siNA molecules, any nucleotides present in a non-complementary region of the sense strand (e.g. overhang region) are 2′-deoxy nucleotides.

[0051] In one embodiment, the invention features a double-stranded short interfering nucleic acid (siNA) molecule that down-regulates expression of a VEGF and/or VEGFr gene, wherein the siNA molecule is assembled from two separate oligonucleotide fragments wherein one fragment comprises the sense region and the second fragment comprises the antisense region of the siNA molecule, and wherein the fragment comprising the sense region includes a terminal cap moiety at the 5′-end, the 3′-end, or both of the 5′ and 3′ ends of the fragment. In another embodiment, the terminal cap moiety is an inverted deoxy abasic moiety or glyceryl moiety. In another embodiment, each of the two fragments of the siNA molecule comprise about 21 nucleotides.

[0052] In one embodiment, the invention features a siNA molecule comprising at least one modified nucleotide, wherein the modified nucleotide is a 2′-deoxy-2′-fluoro nucleotide. The siNA can be, for example, of length between about 12 and about 36 nucleotides. In another embodiment, all pyrimidine nucleotides present in the siNA are 2′-deoxy-2′-fluoro pyrimidine nucleotides. In another embodiment, the modified nucleotides in the siNA include at least one 2′-deoxy-2′-fluoro cytidine or 2′-deoxy-2′-fluoro uridine nucleotide. In another embodiment, the modified nucleotides in the siNA include at least one 2′-fluoro cytidine and at least one 2′-deoxy-2′-fluoro uridine nucleotides. In another embodiment, all uridine nucleotides present in the siNA are 2′-deoxy-2′-fluoro uridine nucleotides. In another embodiment, all cytidine nucleotides present in the siNA are 2′-deoxy-2′-fluoro cytidine nucleotides. In another embodiment, all adenosine nucleotides present in the siNA are 2′-deoxy-2′-fluoro adenosine nucleotides. In another embodiment, all guanosine nucleotides present in the siNA are 2′-deoxy-2′-fluoro guanosine nucleotides. The siNA can further comprise at least one modified internucleotidic linkage, such as phosphorothioate linkage. In another embodiment, the 2′-deoxy-2′-fluoronucleotides are present at specifically selected locations in the siNA that are sensitive to cleavage by ribonucleases, such as locations having pyrimidine nucleotides. In another embodiment, the siNA comprises a sequence that is complementary to a nucleotide sequence in a separate RNA, such as a VEGF or VEGFr RNA.

[0053] In one embodiment, the invention features a method of increasing the stability of a siNA molecule against cleavage by ribonucleases comprising introducing at least one modified nucleotide into the siNA molecule, wherein the modified nucleotide is a 2′-deoxy-2′-fluoro nucleotide. In another embodiment, all pyrimidine nucleotides present in the siNA are 2′-deoxy-2′-fluoro pyrimidine nucleotides. In another embodiment, the modified nucleotides in the siNA include at least one 2′-deoxy-2′-fluoro cytidine or 2′-deoxy-2′-fluoro uridine nucleotide. In another embodiment, the modified nucleotides in the siNA include at least one 2′-fluoro cytidine and at least one 2′-deoxy-2′-fluoro uridine nucleotides. In another embodiment, all uridine nucleotides present in the siNA are 2′-deoxy-2′-fluoro uridine nucleotides. In another embodiment, all cytidine nucleotides present in the siNA are 2′-deoxy-2′-fluoro cytidine nucleotides. In another embodiment, all adenosine nucleotides present in the siNA are 2′-deoxy-2′-fluoro adenosine nucleotides. In another embodiment, all guanosine nucleotides present in the siNA are 2′-deoxy-2′-fluoro guanosine nucleotides. The siNA can further comprise at least one modified internucleotidic linkage, such as phosphorothioate linkage. In another embodiment, the 2′-deoxy-2′-fluoronucleotides are present at specifically selected locations in the siNA that are sensitive to cleavage by ribonucleases, such as locations having pyrimidine nucleotides.

[0054] In one embodiment, the invention features a double-stranded short interfering nucleic acid (siNA) molecule that down-regulates expression of a VEGF and/or VEGFr gene comprising a sense region and an antisense region, wherein the antisense region comprises a nucleotide sequence that is complementary to a nucleotide sequence of RNA encoded by the VEGF and/or VEGFr gene or a portion thereof and the sense region comprises a nucleotide sequence that is complementary to the antisense region, and wherein the purine nucleotides present in the antisense region comprise 2′-deoxy-purine nucleotides. In an alternative embodiment, the purine nucleotides present in the antisense region comprise 2′-O-methyl purine nucleotides. In either of the above embodiments, the antisense region can comprise a phosphorothioate internucleotide linkage at the 3′ end of the antisense region. Alternatively, in either of the above embodiments, the antisense region can comprise a glyceryl modification at the 3′ end of the antisense region. In another embodiment of any of the above-described siNA molecules, any nucleotides present in a non-complementary region of the antisense strand (e.g. overhang region) are 2′-deoxy nucleotides.

[0055] In one embodiment, the invention features a double-stranded short interfering nucleic acid (siNA) molecule that down-regulates expression of a VEGF and/or VEGFr gene, wherein the siNA molecule is assembled from two separate oligonucleotide fragments wherein one fragment comprises the sense region and the second fragment comprises the antisense region of the siNA molecule. In another embodiment about 19 nucleotides of each fragment of the siNA molecule are base-paired to the complementary nucleotides of the other fragment of the siNA molecule and wherein at least two 3′ terminal nucleotides of each fragment of the siNA molecule are not base-paired to the nucleotides of the other fragment of the siNA molecule. In one embodiment, each of the two 3′ terminal nucleotides of each fragment of the siNA molecule is a 2′-deoxy-pyrimidine nucleotide, such as a 2′-deoxy-thymidine. In another embodiment, all 21 nucleotides of each fragment of the siNA molecule are base-paired to the complementary nucleotides of the other fragment of the siNA molecule. In another embodiment, about 19 nucleotides of the antisense region are base-paired to the nucleotide sequence or a portion thereof of the RNA encoded by the VEGF and/or VEGFr gene. In another embodiment, about 21 nucleotides of the antisense region are base-paired to the nucleotide sequence or a portion thereof of the RNA encoded by the VEGF and/or VEGFr gene. In any of the above embodiments, the 5′-end of the fragment comprising said antisense region can optionally includes a phosphate group.

[0056] In one embodiment, the invention features a double-stranded short interfering nucleic acid (siNA) molecule that inhibits the expression of a VEGF and/or VEGFr RNA sequence (e.g., wherein said target RNA sequence is encoded by a VEGF and/or VEGFr gene involved in the VEGF and/or VEGFr pathway), wherein the siNA molecule does not contain any ribonucleotides and wherein each strand of the double-stranded siNA molecule is about 21 nucleotides long. Examples of non-ribonucleotide containing siNA constructs are combinations of stabilization chemistries shown in Table IV in any combination of Sense/Antisense chemistries, such as Stab 7/8, Stab 7/11, Stab 8/8, Stab 18/8, Stab 18/11, Stab 12/13, Stab 7/13, Stab 18/13, Stab 7/19, Stab 8/19, Stab 18/19, Stab 7/20, Stab 8/20, or Stab 18/20.

[0057] In one embodiment, the invention features a medicament comprising a siNA molecule of the invention.

[0058] In one embodiment, the invention features an active ingredient comprising a siNA molecule of the invention.

[0059] In one embodiment, the invention features the use of a double-stranded short interfering nucleic acid (siNA) molecule to down-regulate expression of a VEGF and/or VEGFr gene, wherein the siNA molecule comprises one or more chemical modifications and each strand of the double-stranded siNA is about 21 nucleotides long.

[0060] In one embodiment, a VEGFr gene contemplated by the invention is a VEGFr1, VEGFr2, or VEGFr3 gene.

[0061] In one embodiment, the invention features the use of a double-stranded short interfering nucleic acid (siNA) molecule that inhibits expression of a VEGF and/or VEGFr gene, wherein one of the strands of the double-stranded siNA molecule is an antisense strand which comprises nucleotide sequence that is complementary to nucleotide sequence of VEGF and/or VEGFr RNA or a portion thereof, the other strand is a sense strand which comprises nucleotide sequence that is complementary to a nucleotide sequence of the antisense strand and wherein a majority of the pyrimidine nucleotides present in the double-stranded siNA molecule comprises a sugar modification.

[0062] In one embodiment, the invention features a double-stranded short interfering nucleic acid (siNA) molecule that inhibits expression of a VEGF and/or VEGFr gene, wherein one of the strands of the double-stranded siNA molecule is an antisense strand which comprises nucleotide sequence that is complementary to nucleotide sequence of VEGF and/or VEGFr RNA or a portion thereof, wherein the other strand is a sense strand which comprises nucleotide sequence that is complementary to a nucleotide sequence of the antisense strand and wherein a majority of the pyrimidine nucleotides present in the double-stranded siNA molecule comprises a sugar modification. In one embodiment, the VEGFr gene is VEGFr2. In one embodiment, the VEGFr gene is VEGFr1.

[0063] In one embodiment, the invention features a double-stranded short interfering nucleic acid (siNA) molecule that inhibits expression of a VEGF and/or VEGFr gene, wherein one of the strands of the double-stranded siNA molecule is an antisense strand which comprises nucleotide sequence that is complementary to nucleotide sequence of VEGF and/or VEGFr RNA that encodes a protein or portion thereof, the other strand is a sense strand which comprises nucleotide sequence that is complementary to a nucleotide sequence of the antisense strand and wherein a majority of the pyrimidine nucleotides present in the double-stranded siNA molecule comprises a sugar modification. In one embodiment, the invention features a double-stranded short interfering nucleic acid (siNA) molecule that inhibits expression of a VEGF and/or VEGFr gene, wherein one of the strands of the double-stranded siNA molecule is an antisense strand which comprises nucleotide sequence that is complementary to nucleotide sequence of VEGF and/or VEGFr RNA or a portion thereof, the other strand is a sense strand which comprises nucleotide sequence that is complementary to a nucleotide sequence of the antisense strand and wherein a majority of the pyrimidine nucleotides present in the double-stranded siNA molecule comprises a sugar modification. In one embodiment, each strand of the siNA molecule comprises about 19 to about 29 (e.g., about 19, 20, 21, 22, 23, 24, 25, 26, 27, 28, or 29) nucleotides, wherein each strand comprises at least about 19 nucleotides that are complementary to the nucleotides of the other strand. In another embodiment, the siNA molecule is assembled from two oligonucleotide fragments, wherein one fragment comprises the nucleotide sequence of the antisense strand of the siNA molecule and a second fragment comprises nucleotide sequence of the sense region of the siNA molecule. In yet another embodiment, the sense strand is connected to the antisense strand via a linker molecule, such as a polynucleotide linker or a non-nucleotide linker. In a further embodiment, the pyrimidine nucleotides present in the sense strand are 2′-deoxy-2′fluoro pyrimidine nucleotides and the purine nucleotides present in the sense region are 2′-deoxy purine nucleotides. In another embodiment, the pyrimidine nucleotides present in the sense strand are 2′-deoxy-2′fluoro pyrimidine nucleotides and the purine nucleotides present in the sense region are 2′-O-methyl purine nucleotides. In still another embodiment, the pyrimidine nucleotides present in the antisense strand are 2′-deoxy-2′-fluoro pyrimidine nucleotides and any purine nucleotides present in the antisense strand are 2′-deoxy purine nucleotides. In another embodiment, the antisense strand comprises one or more 2′-deoxy-2′-fluoro pyrimidine nucleotides and one or more 2′-O-methyl purine nucleotides. In another embodiment, the pyrimidine nucleotides present in the antisense strand are 2′-deoxy-2′-fluoro pyrimidine nucleotides and any purine nucleotides present in the antisense strand are 2′-O-methyl purine nucleotides. In a further embodiment the sense strand comprises a 3′-end and a 5′-end, wherein a terminal cap moiety (e.g., an inverted deoxy abasic moiety or inverted deoxy nucleotide moiety such as inverted thymidine) is present at the 5′-end, the 3′-end, or both of the 5′ and 3′ ends of the sense strand. In another embodiment, the antisense strand comprises a phosphorothioate internucleotide linkage at the 3′ end of the antisense strand. In another embodiment, the antisense strand comprises a glyceryl modification at the 3′ end. In another embodiment, the 5′-end of the antisense strand optionally includes a phosphate group.

[0064] In one embodiment, the invention features a double-stranded short interfering nucleic acid (siNA) molecule that inhibits expression of a VEGF and/or VEGFr gene, wherein one of the strands of the double-stranded siNA molecule is an antisense strand which comprises nucleotide sequence that is complementary to nucleotide sequence of VEGF and/or VEGFr RNA or a portion thereof, wherein the other strand is a sense strand which comprises nucleotide sequence that is complementary to a nucleotide sequence of the antisense strand and wherein a majority of the pyrimidine nucleotides present in the double-stranded siNA molecule comprises a sugar modification, and wherein each of the two strands of the siNA molecule comprises about 21 nucleotides. In one embodiment, about 21 nucleotides of each strand of the siNA molecule are base-paired to the complementary nucleotides of the other strand of the siNA molecule. In another embodiment, about 19 nucleotides of each strand of the siNA molecule are base-paired to the complementary nucleotides of the other strand of the siNA molecule, wherein at least two 3′ terminal nucleotides of each strand of the siNA molecule are not base-paired to the nucleotides of the other strand of the siNA molecule. In another embodiment, each of the two 3′ terminal nucleotides of each fragment of the siNA molecule is a 2′-deoxy-pyrimidine, such as 2′-deoxy-thymidine. In another embodiment, each strand of the siNA molecule is base-paired to the complementary nucleotides of the other strand of the siNA molecule. In another embodiment, about 19 nucleotides of the antisense strand are base-paired to the nucleotide sequence of the VEGF and/or VEGFr RNA or a portion thereof. In another embodiment, about 21 nucleotides of the antisense strand are base-paired to the nucleotide sequence of the VEGF and/or VEGFr RNA or a portion thereof.

[0065] In one embodiment, the invention features a double-stranded short interfering nucleic acid (siNA) molecule that inhibits expression of a VEGF and/or VEGFr gene, wherein one of the strands of the double-stranded siNA molecule is an antisense strand which comprises nucleotide sequence that is complementary to nucleotide sequence of VEGF and/or VEGFr RNA or a portion thereof, the other strand is a sense strand which comprises nucleotide sequence that is complementary to a nucleotide sequence of the antisense strand and wherein a majority of the pyrimidine nucleotides present in the double-stranded siNA molecule comprises a sugar modification, and wherein the 5′-end of the antisense strand optionally includes a phosphate group.

[0066] In one embodiment, the invention features a double-stranded short interfering nucleic acid (siNA) molecule that inhibits expression of a VEGF and/or VEGFr gene, wherein one of the strands of the double-stranded siNA molecule is an antisense strand which comprises nucleotide sequence that is complementary to nucleotide sequence of VEGF and/or VEGFr RNA or a portion thereof, the other strand is a sense strand which comprises nucleotide sequence that is complementary to a nucleotide sequence of the antisense strand and wherein a majority of the pyrimidine nucleotides present in the double-stranded siNA molecule comprises a sugar modification, and wherein the nucleotide sequence or a portion thereof of the antisense strand is complementary to a nucleotide sequence of the untranslated region or a portion thereof of the VEGF and/or VEGFr RNA.

[0067] In one embodiment, the invention features a double-stranded short interfering nucleic acid (siNA) molecule that inhibits expression of a VEGF and/or VEGFr gene, wherein one of the strands of the double-stranded siNA molecule is an antisense strand which comprises nucleotide sequence that is complementary to nucleotide sequence of VEGF and/or VEGFr RNA or a portion thereof, wherein the other strand is a sense strand which comprises nucleotide sequence that is complementary to a nucleotide sequence of the antisense strand, wherein a majority of the pyrimidine nucleotides present in the double-stranded siNA molecule comprises a sugar modification, and wherein the nucleotide sequence of the antisense strand is complementary to a nucleotide sequence of the VEGF and/or VEGFr RNA or a portion thereof that is present in the VEGF and/or VEGFr RNA.

[0068] In one embodiment, the invention features a composition comprising a siNA molecule of the invention in a pharmaceutically acceptable carrier or diluent.

[0069] In a non-limiting example, the introduction of chemically-modified nucleotides into nucleic acid molecules provides a powerful tool in overcoming potential limitations of in vivo stability and bioavailability inherent to native RNA molecules that are delivered exogenously. For example, the use of chemically-modified nucleic acid molecules can enable a lower dose of a particular nucleic acid molecule for a given therapeutic effect since chemically-modified nucleic acid molecules tend to have a longer half-life in serum. Furthermore, certain chemical modifications can improve the bioavailability of nucleic acid molecules by targeting particular cells or tissues and/or improving cellular uptake of the nucleic acid molecule. Therefore, even if the activity of a chemically-modified nucleic acid molecule is reduced as compared to a native nucleic acid molecule, for example, when compared to an all-RNA nucleic acid molecule, the overall activity of the modified nucleic acid molecule can be greater than that of the native molecule due to improved stability and/or delivery of the molecule. Unlike native unmodified siNA, chemically-modified siNA can also minimize the possibility of activating interferon activity in humans.

[0070] In any of the embodiments of siNA molecules described herein, the antisense region of a siNA molecule of the invention can comprise a phosphorothioate internucleotide linkage at the 3′-end of said antisense region. In any of the embodiments of siNA molecules described herein, the antisense region can comprise about one to about five phosphorothioate internucleotide linkages at the 5′-end of said antisense region. In any of the embodiments of siNA molecules described herein, the 3′-terminal nucleotide overhangs of a siNA molecule of the invention can comprise ribonucleotides or deoxyribonucleotides that are chemically-modified at a nucleic acid sugar, base, or backbone. In any of the embodiments of siNA molecules described herein, the 3′-terminal nucleotide overhangs can comprise one or more universal base ribonucleotides. In any of the embodiments of siNA molecules described herein, the 3′-terminal nucleotide overhangs can comprise one or more acyclic nucleotides.

[0071] One embodiment of the invention provides an expression vector comprising a nucleic acid sequence encoding at least one siNA molecule of the invention in a manner that allows expression of the nucleic acid molecule. Another embodiment of the invention provides a mammalian cell comprising such an expression vector. The mammalian cell can be a human cell. The siNA molecule of the expression vector can comprise a sense region and an antisense region. The antisense region can comprise sequence complementary to a RNA or DNA sequence encoding VEGF and/or VEGFr and the sense region can comprise sequence complementary to the antisense region. The siNA molecule can comprise two distinct strands having complementary sense and antisense regions. The siNA molecule can comprise a single strand having complementary sense and antisense regions.

[0072] In one embodiment, the invention features a chemically-modified short interfering nucleic acid (siNA) molecule capable of mediating RNA interference (RNAi) against a VEGF and/or VEGFr inside a cell or reconstituted in vitro system, wherein the chemical modification comprises one or more (e.g., about 1, 2, 3, 4, 5, 6, 7, 8, 9, 10, or more) nucleotides comprising a backbone modified internucleotide linkage having Formula I: [chemical structure]
[0073] wherein each R1 and R2 is independently any nucleotide, non-nucleotide, or polynucleotide which can be naturally-occurring or chemically-modified, each X and Y is independently O, S, N, alkyl, or substituted alkyl, each Z and W is independently O, S, N, alkyl, substituted alkyl, O-alkyl, S-alkyl, alkaryl, aralkyl, or acetyl and wherein W, X, Y, and Z are optionally not all O. In another embodiment, a backbone modification of the invention comprises a phosphonoacetate and/or thiophosphonoacetate internucleotide linkage (see for example Sheehan et al., 2003, Nucleic Acids Research, 31, 4109-4118).

[0074] The chemically-modified internucleotide linkages having Formula I, for example, wherein any Z, W, X, and/or Y independently comprises a sulphur atom, can be present in one or both oligonucleotide strands of the siNA duplex, for example, in the sense strand, the antisense strand, or both strands. The siNA molecules of the invention can comprise one or more (e.g., about 1, 2, 3, 4, 5, 6, 7, 8, 9, 10, or more) chemically-modified internucleotide linkages having Formula I at the 3′-end, the 5′-end, or both of the 3′ and 5′-ends of the sense strand, the antisense strand, or both strands. For example, an exemplary siNA molecule of the invention can comprise about 1 to about 5 or more (e.g., about 1, 2, 3, 4, 5, or more) chemically-modified internucleotide linkages having Formula I at the 5′-end of the sense strand, the antisense strand, or both strands. In another non-limiting example, an exemplary siNA molecule of the invention can comprise one or more (e.g., about 1, 2, 3, 4, 5, 6, 7, 8, 9, 10, or more) pyrimidine nucleotides with chemically-modified internucleotide linkages having Formula I in the sense strand, the antisense strand, or both strands. In yet another non-limiting example, an exemplary siNA molecule of the invention can comprise one or more (e.g., about 1, 2, 3, 4, 5, 6, 7, 8, 9, 10, or more) purine nucleotides with chemically-modified internucleotide linkages having Formula I in the sense strand, the antisense strand, or both strands. In another embodiment, a siNA molecule of the invention having internucleotide linkage(s) of Formula I also comprises a chemically-modified nucleotide or non-nucleotide having any of Formulae I-VII.

[0075] In one embodiment, the invention features a chemically-modified short interfering nucleic acid (siNA) molecule capable of mediating RNA interference (RNAi) against a VEGF and/or VEGFr inside a cell or reconstituted in vitro system, wherein the chemical modification comprises one or more (e.g., about 1, 2, 3, 4, 5, 6, 7, 8, 9, 10, or more) nucleotides or non-nucleotides having Formula II: [chemical structure]
wherein each R3, R4, R5, R6, R7, R8, R10, R1 and R12 is independently H, OH, alkyl, substituted alkyl, alkaryl or aralkyl, F, Cl, Br, CN, CF3, OCF3, OCN, O-alkyl, S-alkyl, N-alkyl, O-alkenyl, S-alkenyl, N-alkenyl, SO-alkyl, alkyl-OSH, alkyl-OH, O-alkyl-OH, O-alkyl-SH, S-alkyl-OH, S-alkyl-SH, alkyl-S-alkyl, alkyl-O-alkyl, ONO₂, NO₂, N3, NH2, aminoalkyl, aminoacid, aminoacyl, ONH2,0-aminoalkyl, O-aminoacid, O-aminoacyl, heterocycloalkyl, heterocycloalkaryl, aminoalkylamino, polyalklylamino, substituted silyl, or group having Formula I or II; R9 is O, S, CH2, S═O, CHF, or CF2, and B is a nucleosidic base such as adenine, guanine, uracil, cytosine, thymine, 2-aminoadenosine, 5-methylcytosine, 2,6-diaminopurine, or any other non-naturally occurring base that can be complementary or non-complementary to target RNA or a non-nucleosidic base such as phenyl, naphthyl, 3-nitropyrrole, 5-nitroindole, nebularine, pyridone, pyridinone, or any other non-naturally occurring universal base that can be complementary or non-complementary to target RNA.

[0077] The chemically-modified nucleotide or non-nucleotide of Formula II can be present in one or both oligonucleotide strands of the siNA duplex, for example in the sense strand, the antisense strand, or both strands. The siNA molecules of the invention can comprise one or more chemically-modified nucleotide or non-nucleotide of Formula II at the 3′-end, the 5′-end, or both of the 3′ and 5′-ends of the sense strand, the antisense strand, or both strands. For example, an exemplary siNA molecule of the invention can comprise about 1 to about 5 or more (e.g., about 1, 2, 3, 4, 5, or more) chemically-modified nucleotides or non-nucleotides of Formula II at the 5′-end of the sense strand, the antisense strand, or both strands. In anther non-limiting example, an exemplary siNA molecule of the invention can comprise about 1 to about 5 or more (e.g., about 1, 2, 3, 4, 5, or more) chemically-modified nucleotides or non-nucleotides of Formula II at the 3′-end of the sense strand, the antisense strand, or both strands.

[0078] In one embodiment, the invention features a chemically-modified short interfering nucleic acid (siNA) molecule capable of mediating RNA interference (RNAi) against a VEGF and/or VEGFr inside a cell or reconstituted in vitro system, wherein the chemical modification comprises one or more (e.g., about 1, 2, 3, 4, 5, 6, 7, 8, 9, 10, or more) nucleotides or non-nucleotides having Formula III: [chemical structure]
wherein each R3, R4, R5, R6, R7, R8, R10, R11 and R12 is independently H, OH, alkyl, substituted alkyl, alkaryl or aralkyl, F, Cl, Br, CN, CF3, OCF3, OCN, O-alkyl, S-alkyl, N-alkyl, O-alkenyl, S-alkenyl, N-alkenyl, SO-alkyl, alkyl-OSH, alkyl-OH, O-alkyl-OH, O-alkyl-SH, S-alkyl-OH, S-alkyl-SH, alkyl-S-alkyl, alkyl-O-alkyl, ONO₂, NO₂, N3, NH2, aminoalkyl, aminoacid, aminoacyl, ONH2,0-aminoalkyl, O-aminoacid, O-aminoacyl, heterocycloalkyl, heterocycloalkaryl, aminoalkylamino, polyalklylamino, substituted silyl, or group having Formula I or II; R9 is O, S, CH2, S═O, CHF, or CF2, and B is a nucleosidic base such as adenine, guanine, uracil, cytosine, thymine, 2-aminoadenosine, 5-methylcytosine, 2,6-diaminopurine, or any other non-naturally occurring base that can be employed to be complementary or non-complementary to target RNA or a non-nucleosidic base such as phenyl, naphthyl, 3-nitropyrrole, 5-nitroindole, nebularine, pyridone, pyridinone, or any other non-naturally occurring universal base that can be complementary or non-complementary to target RNA.

[0080] The chemically-modified nucleotide or non-nucleotide of Formula III can be present in one or both oligonucleotide strands of the siNA duplex, for example, in the sense strand, the antisense strand, or both strands. The siNA molecules of the invention can comprise one or more chemically-modified nucleotide or non-nucleotide of Formula III at the 3′-end, the 5′-end, or both of the 3′ and 5′-ends of the sense strand, the antisense strand, or both strands. For example, an exemplary siNA molecule of the invention can comprise about 1 to about 5 or more (e.g., about 1, 2, 3, 4, 5, or more) chemically-modified nucleotide(s) or non-nucleotide(s) of Formula III at the 5′-end of the sense strand, the antisense strand, or both strands. In anther non-limiting example, an exemplary siNA molecule of the invention can comprise about 1 to about 5 or more (e.g., about 1, 2, 3, 4, 5, or more) chemically-modified nucleotide or non-nucleotide of Formula III at the 3′-end of the sense strand, the antisense strand, or both strands.

[0081] In another embodiment, a siNA molecule of the invention comprises a nucleotide having Formula II or III, wherein the nucleotide having Formula II or III is in an inverted configuration. For example, the nucleotide having Formula II or III is connected to the siNA construct in a 3′-3′,3′-2′,2′-3′, or 5′-5′ configuration, such as at the 3′-end, the 5′-end, or both of the 3′ and 5′-ends of one or both siNA strands.

[0082] In one embodiment, the invention features a chemically-modified short interfering nucleic acid (siNA) molecule capable of mediating RNA interference (RNAi) against a VEGF and/or VEGFr inside a cell or reconstituted in vitro system, wherein the chemical modification comprises a 5′-terminal phosphate group having Formula IV: [chemical structure]
wherein each X and Y is independently O, S, N, alkyl, substituted alkyl, or alkylhalo; wherein each Z and W is independently O, S, N, alkyl, substituted alkyl, O-alkyl, S-alkyl, alkaryl, aralkyl, alkylhalo, or acetyl; and wherein W, X, Y and Z are not all O.

[0084] In one embodiment, the invention features a siNA molecule having a 5′-terminal phosphate group having Formula IV on the target-complementary strand, for example, a strand complementary to a target RNA, wherein the siNA molecule comprises an all RNA siNA molecule. In another embodiment, the invention features a siNA molecule having a 5′-terminal phosphate group having Formula IV on the target-complementary strand wherein the siNA molecule also comprises about 1 to about 3 (e.g., about 1, 2, or 3) nucleotide 3′-terminal nucleotide overhangs having about 1 to about 4 (e.g., about 1, 2, 3, or 4) deoxyribonucleotides on the 3′-end of one or both strands. In another embodiment, a 5′-terminal phosphate group having Formula IV is present on the target-complementary strand of a siNA molecule of the invention, for example a siNA molecule having chemical modifications having any of Formulae I-VII.

[0085] In one embodiment, the invention features a chemically-modified short interfering nucleic acid (siNA) molecule capable of mediating RNA interference (RNAi) against a VEGF and/or VEGFr inside a cell or reconstituted in vitro system, wherein the chemical modification comprises one or more phosphorothioate internucleotide linkages. For example, in a non-limiting example, the invention features a chemically-modified short interfering nucleic acid (siNA) having about 1, 2, 3, 4, 5, 6, 7, 8 or more phosphorothioate internucleotide linkages in one siNA strand. In yet another embodiment, the invention features a chemically-modified short interfering nucleic acid (siNA) individually having about 1, 2, 3, 4, 5, 6, 7, 8 or more phosphorothioate internucleotide linkages in both siNA strands. The phosphorothioate internucleotide linkages can be present in one or both oligonucleotide strands of the siNA duplex, for example in the sense strand, the antisense strand, or both strands. The siNA molecules of the invention can comprise one or more phosphorothioate internucleotide linkages at the 3′-end, the 5′-end, or both of the 3′- and 5′-ends of the sense strand, the antisense strand, or both strands. For example, an exemplary siNA molecule of the invention can comprise about 1 to about 5 or more (e.g., about 1, 2, 3, 4, 5, or more) consecutive phosphorothioate internucleotide linkages at the 5′-end of the sense strand, the antisense strand, or both strands. In another non-limiting example, an exemplary siNA molecule of the invention can comprise one or more (e.g., about 1, 2, 3, 4, 5, 6, 7, 8, 9, 10, or more) pyrimidine phosphorothioate internucleotide linkages in the sense strand, the antisense strand, or both strands. In yet another non-limiting example, an exemplary siNA molecule of the invention can comprise one or more (e.g., about 1, 2, 3, 4, 5, 6, 7, 8, 9, 10, or more) purine phosphorothioate internucleotide linkages in the sense strand, the antisense strand, or both strands.

[0086] In one embodiment, the invention features a siNA molecule, wherein the sense strand comprises one or more, for example, about 1, 2, 3, 4, 5, 6, 7, 8, 9, 10, or more phosphorothioate internucleotide linkages, and/or one or more (e.g., about 1, 2, 3, 4, 5, 6, 7, 8, 9, 10 or more) 2′-deoxy, 2′-O-methyl, 2′-deoxy-2′-fluoro, and/or about one or more (e.g., about 1, 2, 3, 4, 5, 6, 7, 8, 9, 10 or more) universal base modified nucleotides, and optionally a terminal cap molecule at the 3′-end, the 5′-end, or both of the 3′- and 5′-ends of the sense strand; and wherein the antisense strand comprises about 1 to about 10 or more, specifically about 1, 2, 3, 4, 5, 6, 7, 8, 9, 10, or more phosphorothioate internucleotide linkages, and/or one or more (e.g., about 1, 2, 3, 4, 5, 6, 7, 8, 9, 10 or more) 2′-deoxy, 2′-O-methyl, 2′-deoxy-2′-fluoro, and/or one or more (e.g., about 1, 2, 3, 4, 5, 6, 7, 8, 9, 10 or more) universal base modified nucleotides, and optionally a terminal cap molecule at the 3′-end, the 5′-end, or both of the 3′- and 5′-ends of the antisense strand. In another embodiment, one or more, for example about 1, 2, 3, 4, 5, 6, 7, 8, 9, 10, or more, pyrimidine nucleotides of the sense and/or antisense siNA strand are chemically-modified with 2′-deoxy, 2′-O-methyl and/or 2′-deoxy-2′-fluoro nucleotides, with or without one or more, for example about 1, 2, 3, 4, 5, 6, 7, 8, 9, 10, or more, phosphorothioate internucleotide linkages and/or a terminal cap molecule at the 3′-end, the 5′-end, or both of the 3′- and 5′-ends, being present in the same or different strand.

[0087] In another embodiment, the invention features a siNA molecule, wherein the sense strand comprises about 1 to about 5, specifically about 1, 2, 3, 4, or 5 phosphorothioate internucleotide linkages, and/or one or more (e.g., about 1, 2, 3, 4, 5, or more) 2′-deoxy, 2′-O-methyl, 2′-deoxy-2′-fluoro, and/or one or more (e.g., about 1, 2, 3, 4, 5, or more) universal base modified nucleotides, and optionally a terminal cap molecule at the 3-end, the 5′-end, or both of the 3′- and 5′-ends of the sense strand; and wherein the antisense strand comprises about 1 to about 5 or more, specifically about 1, 2, 3, 4, 5, or more phosphorothioate internucleotide linkages, and/or one or more (e.g., about 1, 2, 3, 4, 5, 6, 7, 8, 9, 10 or more) 2′-deoxy, 2′-O-methyl, 2′-deoxy-2′-fluoro, and/or one or more (e.g., about 1, 2, 3, 4, 5, 6, 7, 8, 9, 10 or more) universal base modified nucleotides, and optionally a terminal cap molecule at the 3′-end, the 5′-end, or both of the 3′- and 5′-ends of the antisense strand. In another embodiment, one or more, for example about 1, 2, 3, 4, 5, 6, 7, 8, 9, 10, or more, pyrimidine nucleotides of the sense and/or antisense siNA strand are chemically-modified with 2′-deoxy, 2′-O-methyl and/or 2′-deoxy-2′-fluoro nucleotides, with or without about 1 to about 5 or more, for example about 1, 2, 3, 4, 5, or more phosphorothioate internucleotide linkages and/or a terminal cap molecule at the 3′-end, the 5′-end, or both of the 3′- and 5′-ends, being present in the same or different strand.

[0088] In one embodiment, the invention features a siNA molecule, wherein the antisense strand comprises one or more, for example, about 1, 2, 3, 4, 5, 6, 7, 8, 9, 10, or more phosphorothioate internucleotide linkages, and/or about one or more (e.g., about 1, 2, 3, 4, 5, 6, 7, 8, 9, 10 or more) 2′-deoxy, 2′-O-methyl, 2′-deoxy-2′-fluoro, and/or one or more (e.g., about 1, 2, 3, 4, 5, 6, 7, 8, 9, 10 or more) universal base modified nucleotides, and optionally a terminal cap molecule at the 3′-end, the 5′-end, or both of the 3′- and 5′-ends of the sense strand; and wherein the antisense strand comprises about 1 to about 10 or more, specifically about 1, 2, 3, 4, 5, 6, 7, 8, 9, 10 or more phosphorothioate internucleotide linkages, and/or one or more (e.g., about 1, 2, 3, 4, 5, 6, 7, 8, 9, 10 or more) 2′-deoxy, 2′-O-methyl, 2′-deoxy-2′-fluoro, and/or one or more (e.g., about 1, 2, 3, 4, 5, 6, 7, 8, 9, 10 or more) universal base modified nucleotides, and optionally a terminal cap molecule at the 3′-end, the 5′-end, or both of the 3′- and 5′-ends of the antisense strand. In another embodiment, one or more, for example about 1, 2, 3, 4, 5, 6, 7, 8, 9, 10 or more pyrimidine nucleotides of the sense and/or antisense siNA strand are chemically-modified with 2′-deoxy, 2′-O-methyl and/or 2′-deoxy-2′-fluoro nucleotides, with or without one or more, for example, about 1, 2, 3, 4, 5, 6, 7, 8, 9, 10 or more phosphorothioate internucleotide linkages and/or a terminal cap molecule at the 3′-end, the 5′-end, or both of the 3′ and 5′-ends, being present in the same or different strand.

[0089] In another embodiment, the invention features a siNA molecule, wherein the antisense strand comprises about 1 to about 5 or more, specifically about 1, 2, 3, 4, 5 or more phosphorothioate internucleotide linkages, and/or one or more (e.g., about 1, 2, 3, 4, 5, 6, 7, 8, 9, 10 or more) 2′-deoxy, 2′-O-methyl, 2′-deoxy-2′-fluoro, and/or one or more (e.g., about 1, 2, 3, 4, 5, 6, 7, 8, 9, 10 or more) universal base modified nucleotides, and optionally a terminal cap molecule at the 3′-end, the 5′-end, or both of the 3′- and 5′-ends of the sense strand; and wherein the antisense strand comprises about 1 to about 5 or more, specifically about 1, 2, 3, 4, 5 or more phosphorothioate internucleotide linkages, and/or one or more (e.g., about 1, 2, 3, 4, 5, 6, 7, 8, 9, 10 or more) 2′-deoxy, 2′-O-methyl, 2′-deoxy-2′-fluoro, and/or one or more (e.g., about 1, 2, 3, 4, 5, 6, 7, 8, 9, 10 or more) universal base modified nucleotides, and optionally a terminal cap molecule at the 3′-end, the 5′-end, or both of the 3′- and 5′-ends of the antisense strand. In another embodiment, one or more, for example about 1, 2, 3, 4, 5, 6, 7, 8, 9, 10 or more pyrimidine nucleotides of the sense and/or antisense siNA strand are chemically-modified with 2′-deoxy, 2′-O-methyl and/or 2′-deoxy-2′-fluoro nucleotides, with or without about 1 to about 5, for example about 1, 2, 3, 4, 5 or more phosphorothioate internucleotide linkages and/or a terminal cap molecule at the 3′-end, the 5′-end, or both of the 3′- and 5′-ends, being present in the same or different strand.

[0090] In one embodiment, the invention features a chemically-modified short interfering nucleic acid (siNA) molecule having about 1 to about 5, specifically about 1, 2, 3, 4, 5 or more phosphorothioate internucleotide linkages in each strand of the siNA molecule.

[0091] In another embodiment, the invention features a siNA molecule comprising 2′-5′ internucleotide linkages. The 2′-5′ internucleotide linkage(s) can be at the 3′-end, the 5′-end, or both of the 3′- and 5′-ends of one or both siNA sequence strands. In addition, the 2′-5′ internucleotide linkage(s) can be present at various other positions within one or both siNA sequence strands, for example, about 1, 2, 3, 4, 5, 6, 7, 8, 9, 10, or more including every internucleotide linkage of a pyrimidine nucleotide in one or both strands of the siNA molecule can comprise a 2′-5′ internucleotide linkage, or about 1, 2, 3, 4, 5, 6, 7, 8, 9, 10, or more including every internucleotide linkage of a purine nucleotide in one or both strands of the siNA molecule can comprise a 2′-5′ internucleotide linkage.

[0092] In another embodiment, a chemically-modified siNA molecule of the invention comprises a duplex having two strands, one or both of which can be chemically-modified, wherein each strand is about 18 to about 27 (e.g., about 18, 19, 20, 21, 22, 23, 24, 25, 26, or 27) nucleotides in length, wherein the duplex has about 18 to about 23 (e.g., about 18, 19, 20, 21, 22, or 23) base pairs, and wherein the chemical modification comprises a structure having any of Formulae I-VII. For example, an exemplary chemically-modified siNA molecule of the invention comprises a duplex having two strands, one or both of which can be chemically-modified with a chemical modification having any of Formulae I-VII or any combination thereof, wherein each strand consists of about 21 nucleotides, each having a 2-nucleotide 3′-terminal nucleotide overhang, and wherein the duplex has about 19 base pairs. In another embodiment, a siNA molecule of the invention comprises a single stranded hairpin structure, wherein the siNA is about 36 to about 70 (e.g., about 36, 40, 45, 50, 55, 60, 65, or 70) nucleotides in length having about 18 to about 23 (e.g., about 18, 19, 20, 21, 22, or 23) base pairs, and wherein the siNA can include a chemical modification comprising a structure having any of Formulae I-VII or any combination thereof. For example, an exemplary chemically-modified siNA molecule of the invention comprises a linear oligonucleotide having about 42 to about 50 (e.g., about 42, 43, 44, 45, 46, 47, 48, 49, or 50) nucleotides that is chemically-modified with a chemical modification having any of Formulae I-VII or any combination thereof, wherein the linear oligonucleotide forms a hairpin structure having about 19 base pairs and a 2-nucleotide 3′-terminal nucleotide overhang. In another embodiment, a linear hairpin siNA molecule of the invention contains a stem loop motif, wherein the loop portion of the siNA molecule is biodegradable. For example, a linear hairpin siNA molecule of the invention is designed such that degradation of the loop portion of the siNA molecule in vivo can generate a double-stranded siNA molecule with 3′-terminal overhangs, such as 3′-terminal nucleotide overhangs comprising about 2 nucleotides.

[0093] In another embodiment, a siNA molecule of the invention comprises a hairpin structure, wherein the siNA is about 25 to about 50 (e.g., about 25, 26, 27, 28, 29, 30, 31, 32, 33, 34, 35, 36, 37, 38, 39, 40, 41, 42, 43, 44, 45, 46, 47, 48, 49, or 50) nucleotides in length having about 3 to about 25 (e.g., about 3, 4, 5, 6, 7, 8, 9, 10, 11, 12, 13, 14, 15, 16, 17, 18, 19, 20, 21, 22, 23, 24, or 25) base pairs, and wherein the siNA can include one or more chemical modifications comprising a structure having any of Formulae I-VII or any combination thereof. For example, an exemplary chemically-modified siNA molecule of the invention comprises a linear oligonucleotide having about 25 to about 35 (e.g., about 25, 26, 27, 28, 29, 30, 31, 32, 33, 34, or 35) nucleotides that is chemically-modified with one or more chemical modifications having any of Formulae I-VII or any combination thereof, wherein the linear oligonucleotide forms a hairpin structure having about 3 to about 23 (e.g., about 3, 4, 5, 6, 7, 8, 9, 10, 11, 12, 13, 14, 15, 16, 17, 18, 19, 20, 21, 22, or 23) base pairs and a 5′-terminal phosphate group that can be chemically modified as described herein (for example a 5′-terminal phosphate group having Formula IV). In another embodiment, a linear hairpin siNA molecule of the invention contains a stem loop motif, wherein the loop portion of the siNA molecule is biodegradable. In another embodiment, a linear hairpin siNA molecule of the invention comprises a loop portion comprising a non-nucleotide linker.

[0094] In another embodiment, a siNA molecule of the invention comprises an asymmetric hairpin structure, wherein the siNA is about 25 to about 50 (e.g., about 25, 26, 27, 28, 29, 30, 31, 32, 33, 34, 35, 36, 37, 38, 39, 40, 41, 42, 43, 44, 45, 46, 47, 48, 49, or 50) nucleotides in length having about 3 to about 20 (e.g., about 3, 4, 5, 6, 7, 8, 9, 10, 11, 12, 13, 14, 15, 16, 17, 18, 19, or 20) base pairs, and wherein the siNA can include one or more chemical modifications comprising a structure having any of Formulae I-VII or any combination thereof. For example, an exemplary chemically-modified siNA molecule of the invention comprises a linear oligonucleotide having about 25 to about 35 (e.g., about 25, 26, 27, 28, 29, 30, 31, 32, 33, 34, or 35) nucleotides that is chemically-modified with one or more chemical modifications having any of Formulae I-VII or any combination thereof, wherein the linear oligonucleotide forms an asymmetric hairpin structure having about 3 to about 18 (e.g., about 3, 4, 5, 6, 7, 8, 9, 10, 11, 12, 13, 14, 15, 16, 17 or 18) base pairs and a 5′-terminal phosphate group that can be chemically modified as described herein (for example a 5′-terminal phosphate group having Formula IV). In another embodiment, an asymmetric hairpin siNA molecule of the invention contains a stem loop motif, wherein the loop portion of the siNA molecule is biodegradable. In another embodiment, an asymmetric hairpin siNA molecule of the invention comprises a loop portion comprising a non-nucleotide linker.

[0095] In another embodiment, a siNA molecule of the invention comprises an asymmetric double stranded structure having separate polynucleotide strands comprising sense and antisense regions, wherein the antisense region is about 16 to about 25 (e.g., about 16, 17, 18, 19, 20, 21, 22, 23, 24, or 25) nucleotides in length, wherein the sense region is about 3 to about 18 (e.g., about 3, 4, 5, 6, 7, 8, 9, 10, 11, 12, 13, 14, 15, 16, 17, or 18) nucleotides in length, wherein the sense region and the antisense region have at least 3 complementary nucleotides, and wherein the siNA can include one or more chemical modifications comprising a structure having any of Formulae I-VII or any combination thereof. For example, an exemplary chemically-modified siNA molecule of the invention comprises an asymmetric double stranded structure having separate polynucleotide strands comprising sense and antisense regions, wherein the antisense region is about 18 to about 22 (e.g., about 18, 19, 20, 21, or 22) nucleotides in length and wherein the sense region is about 3 to about 15 (e.g., about 3, 4, 5, 6, 7, 8, 9, 10, 11, 12, 13, 14, or 15) nucleotides in length, wherein the sense region the antisense region have at least 3 complementary nucleotides, and wherein the siNA can include one or more chemical modifications comprising a structure having any of Formulae I-VII or any combination thereof. In another embodiment, the asymmetic double stranded siNA molecule can also have a 5′-terminal phosphate group that can be chemically modified as described herein (for example a 5′-terminal phosphate group having Formula IV).

[0096] In another embodiment, a siNA molecule of the invention comprises a circular nucleic acid molecule, wherein the siNA is about 38 to about 70 (e.g., about 38, 40, 45, 50, 55, 60, 65, or 70) nucleotides in length having about 18 to about 23 (e.g., about 18, 19, 20, 21, 22, or 23) base pairs, and wherein the siNA can include a chemical modification, which comprises a structure having any of Formulae I-VII or any combination thereof. For example, an exemplary chemically-modified siNA molecule of the invention comprises a circular oligonucleotide having about 42 to about 50 (e.g., about 42, 43, 44, 45, 46, 47, 48, 49, or 50) nucleotides that is chemically-modified with a chemical modification having any of Formulae I-VII or any combination thereof, wherein the circular oligonucleotide forms a dumbbell shaped structure having about 19 base pairs and 2 loops.

[0097] In another embodiment, a circular siNA molecule of the invention contains two loop motifs, wherein one or both loop portions of the siNA molecule is biodegradable. For example, a circular siNA molecule of the invention is designed such that degradation of the loop portions of the siNA molecule in vivo can generate a double-stranded siNA molecule with 3′-terminal overhangs, such as 3′-terminal nucleotide overhangs comprising about 2 nucleotides.

[0098] In one embodiment, a siNA molecule of the invention comprises at least one (e.g., about 1, 2, 3, 4, 5, 6, 7, 8, 9, 10, or more) abasic moiety, for example a compound having Formula V: [chemical structure]
wherein each R3, R4, R5, R6, R7, R8, R10, R11, R12, and R13 is independently H, OH, alkyl, substituted alkyl, alkaryl or aralkyl, F, Cl, Br, CN, CF3, OCF3, OCN, O-alkyl, S-alkyl, N-alkyl, O-alkenyl, S-alkenyl, N-alkenyl, SO-alkyl, alkyl-OSH, alkyl-OH, O-alkyl-OH, O-alkyl-SH, S-alkyl-OH, S-alkyl-SH, alkyl-S-alkyl, alkyl-O-alkyl, ONO₂, NO₂, N3, NH2, aminoalkyl, aminoacid, aminoacyl, ONH2,0-aminoalkyl, O-aminoacid, O-aminoacyl, heterocycloalkyl, heterocycloalkaryl, aminoalkylamino, polyalklylamino, substituted silyl, or group having Formula I or II; R9 is O, S, CH2, S═O, CHF, or CF2.

[0100] In one embodiment, a siNA molecule of the invention comprises at least one (e.g., about 1, 2, 3, 4, 5, 6, 7, 8, 9, 10, or more) inverted abasic moiety, for example a compound having Formula VI: [chemical structure]
wherein each R3, R4, R5, R6, R7, R8, R10, R11, R12, and R13 is independently H, OH, alkyl, substituted alkyl, alkaryl or aralkyl, F, Cl, Br, CN, CF3, OCF3, OCN, O-alkyl, S-alkyl, N-alkyl, O-alkenyl, S-alkenyl, N-alkenyl, SO-alkyl, alkyl-OSH, alkyl-OH, O-alkyl-OH, O-alkyl-SH, S-alkyl-OH, S-alkyl-SH, alkyl-S-alkyl, alkyl-O-alkyl, ONO₂, NO₂, N3, NH2, aminoalkyl, aminoacid, aminoacyl, ONH2,0-aminoalkyl, O-aminoacid, O-aminoacyl, heterocycloalkyl, heterocycloalkaryl, aminoalkylamino, polyalklylamino, substituted silyl, or group having Formula I or II; R9 is O, S, CH2, S═O, CHF, or CF2, and either R2, R3, R8 or R13 serve as points of attachment to the siNA molecule of the invention.

[0102] In another embodiment, a siNA molecule of the invention comprises at least one (e.g., about 1, 2, 3, 4, 5, 6, 7, 8, 9, 10, or more) substituted polyalkyl moieties, for example a compound having Formula VII: [chemical structure]
wherein each n is independently an integer from 1 to 12, each R1, R2 and R3 is independently H, OH, alkyl, substituted alkyl, alkaryl or aralkyl, F, Cl, Br, CN, CF3, OCF3, OCN, O-alkyl, S-alkyl, N-alkyl, O-alkenyl, S-alkenyl, N-alkenyl, SO-alkyl, alkyl-OSH, alkyl-OH, O-alkyl-OH, O-alkyl-SH, S-alkyl-OH, S-alkyl-SH, alkyl-S-alkyl, alkyl-O-alkyl, ONO₂, NO₂, N3, NH2, aminoalkyl, aminoacid, aminoacyl, ONH2, 0-aminoalkyl, O-aminoacid, O-aminoacyl, heterocycloalkyl, heterocycloalkaryl, aminoalkylamino, polyalklylamino, substituted silyl, or a group having Formula I, and R1, R2 or R3 serves as points of attachment to the siNA molecule of the invention.

[0104] In another embodiment, the invention features a compound having Formula VII, wherein R1 and R2 are hydroxyl (OH) groups, n=1, and R3 comprises 0 and is the point of attachment to the 3′-end, the 5′-end, or both of the 3′ and 5′-ends of one or both strands of a double-stranded siNA molecule of the invention or to a single-stranded siNA molecule of the invention. This modification is referred to herein as “glyceryl” (for example modification 6 in FIG. 10).

[0105] In another embodiment, a moiety having any of Formula V, VI or VII of the invention is at the 3′-end, the 5′-end, or both of the 3′ and 5′-ends of a siNA molecule of the invention. For example, a moiety having Formula V, VI or VII can be present at the 3′-end, the 5′-end, or both of the 3′ and 5′-ends of the antisense strand, the sense strand, or both antisense and sense strands of the siNA molecule. In addition, a moiety having Formula VII can be present at the 3′-end or the 5′-end of a hairpin siNA molecule as described herein.

[0106] In another embodiment, a siNA molecule of the invention comprises an abasic residue having Formula V or VI, wherein the abasic residue having Formula VI or VI is connected to the siNA construct in a 3′-3′,3′-2′,2′-3′, or 5′-5′ configuration, such as at the 3′-end, the 5′-end, or both of the 3′ and 5′-ends of one or both siNA strands.

[0107] In one embodiment, a siNA molecule of the invention comprises one or more (e.g., about 1, 2, 3, 4, 5, 6, 7, 8, 9, 10, or more) locked nucleic acid (LNA) nucleotides, for example at the 5′-end, the 3′-end, both of the 5′ and 3′-ends, or any combination thereof, of the siNA molecule.

[0108] In another embodiment, a siNA molecule of the invention comprises one or more (e.g., about 1, 2, 3, 4, 5, 6, 7, 8, 9, 10, or more) acyclic nucleotides, for example at the 5′-end, the 3′-end, both of the 5′ and 3′-ends, or any combination thereof, of the siNA molecule.

[0109] In one embodiment, the invention features a chemically-modified short interfering nucleic acid (siNA) molecule of the invention comprising a sense region, wherein any (e.g., one or more or all) pyrimidine nucleotides present in the sense region are 2′-deoxy-2′-fluoro pyrimidine nucleotides (e.g., wherein all pyrimidine nucleotides are 2′-deoxy-2′-fluoro pyrimidine nucleotides or alternately a plurality of pyrimidine nucleotides are 2′-deoxy-2′-fluoro pyrimidine nucleotides), and wherein any (e.g., one or more or all) purine nucleotides present in the sense region are 2′-deoxy purine nucleotides (e.g., wherein all purine nucleotides are 2′-deoxy purine nucleotides or alternately a plurality of purine nucleotides are 2′-deoxy purine nucleotides).

[0110] In one embodiment, the invention features a chemically-modified short interfering nucleic acid (siNA) molecule of the invention comprising a sense region, wherein any (e.g., one or more or all) pyrimidine nucleotides present in the sense region are 2′-deoxy-2′-fluoro pyrimidine nucleotides (e.g., wherein all pyrimidine nucleotides are 2′-deoxy-2′-fluoro pyrimidine nucleotides or alternately a plurality of pyrimidine nucleotides are 2′-deoxy-2′-fluoro pyrimidine nucleotides), and wherein any (e.g., one or more or all) purine nucleotides present in the sense region are 2′-deoxy purine nucleotides (e.g., wherein all purine nucleotides are 2′-deoxy purine nucleotides or alternately a plurality of purine nucleotides are 2′-deoxy purine nucleotides), wherein any nucleotides comprising a 3′-terminal nucleotide overhang that are present in said sense region are 2′-deoxy nucleotides.

[0111] In one embodiment, the invention features a chemically-modified short interfering nucleic acid (siNA) molecule of the invention comprising a sense region, wherein any (e.g., one or more or all) pyrimidine nucleotides present in the sense region are 2′-deoxy-2′-fluoro pyrimidine nucleotides (e.g., wherein all pyrimidine nucleotides are 2′-deoxy-2′-fluoro pyrimidine nucleotides or alternately a plurality of pyrimidine nucleotides are 2′-deoxy-2′-fluoro pyrimidine nucleotides), and wherein any (e.g., one or more or all) purine nucleotides present in the sense region are 2′-O-methyl purine nucleotides (e.g., wherein all purine nucleotides are 2′-O-methyl purine nucleotides or alternately a plurality of purine nucleotides are 2′-O-methyl purine nucleotides).

[0112] In one embodiment, the invention features a chemically-modified short interfering nucleic acid (siNA) molecule of the invention comprising a sense region, wherein any (e.g., one or more or all) pyrimidine nucleotides present in the sense region are 2′-deoxy-2′-fluoro pyrimidine nucleotides (e.g., wherein all pyrimidine nucleotides are 2′-deoxy-2′-fluoro pyrimidine nucleotides or alternately a plurality of pyrimidine nucleotides are 2′-deoxy-2′-fluoro pyrimidine nucleotides), wherein any (e.g., one or more or all) purine nucleotides present in the sense region are 2′-O-methyl purine nucleotides (e.g., wherein all purine nucleotides are 2′-O-methyl purine nucleotides or alternately a plurality of purine nucleotides are 2′-O-methyl purine nucleotides), and wherein any nucleotides comprising a 3′-terminal nucleotide overhang that are present in said sense region are 2′-deoxy nucleotides.

[0113] In one embodiment, the invention features a chemically-modified short interfering nucleic acid (siNA) molecule of the invention comprising an antisense region, wherein any (e.g., one or more or all) pyrimidine nucleotides present in the antisense region are 2′-deoxy-2′-fluoro pyrimidine nucleotides (e.g., wherein all pyrimidine nucleotides are 2′-deoxy-2′-fluoro pyrimidine nucleotides or alternately a plurality of pyrimidine nucleotides are 2′-deoxy-2′-fluoro pyrimidine nucleotides), and wherein any (e.g., one or more or all) purine nucleotides present in the antisense region are 2′-O-methyl purine nucleotides (e.g., wherein all purine nucleotides are 2′-O-methyl purine nucleotides or alternately a plurality of purine nucleotides are 2′-O-methyl purine nucleotides).

[0114] In one embodiment, the invention features a chemically-modified short interfering nucleic acid (siNA) molecule of the invention comprising an antisense region, wherein any (e.g., one or more or all) pyrimidine nucleotides present in the antisense region are 2′-deoxy-2′-fluoro pyrimidine nucleotides (e.g., wherein all pyrimidine nucleotides are 2′-deoxy-2′-fluoro pyrimidine nucleotides or alternately a plurality of pyrimidine nucleotides are 2′-deoxy-2′-fluoro pyrimidine nucleotides), wherein any (e.g., one or more or all) purine nucleotides present in the antisense region are 2′-O-methyl purine nucleotides (e.g., wherein all purine nucleotides are 2′-O-methyl purine nucleotides or alternately a plurality of purine nucleotides are 2′-O-methyl purine nucleotides), and wherein any nucleotides comprising a 3′-terminal nucleotide overhang that are present in said antisense region are 2′-deoxy nucleotides.

[0115] In one embodiment, the invention features a chemically-modified short interfering nucleic acid (siNA) molecule of the invention comprising an antisense region, wherein any (e.g., one or more or all) pyrimidine nucleotides present in the antisense region are 2′-deoxy-2′-fluoro pyrimidine nucleotides (e.g., wherein all pyrimidine nucleotides are 2′-deoxy-2′-fluoro pyrimidine nucleotides or alternately a plurality of pyrimidine nucleotides are 2′-deoxy-2′-fluoro pyrimidine nucleotides), and wherein any (e.g., one or more or all) purine nucleotides present in the antisense region are 2′-deoxy purine nucleotides (e.g., wherein all purine nucleotides are 2′-deoxy purine nucleotides or alternately a plurality of purine nucleotides are 2′-deoxy purine nucleotides).

[0116] In one embodiment, the invention features a chemically-modified short interfering nucleic acid (siNA) molecule of the invention comprising an antisense region, wherein any (e.g., one or more or all) pyrimidine nucleotides present in the antisense region are 2′-deoxy-2′-fluoro pyrimidine nucleotides (e.g., wherein all pyrimidine nucleotides are 2′-deoxy-2′-fluoro pyrimidine nucleotides or alternately a plurality of pyrimidine nucleotides are 2′-deoxy-2′-fluoro pyrimidine nucleotides), and wherein any (e.g., one or more or all) purine nucleotides present in the antisense region are 2′-O-methyl purine nucleotides (e.g., wherein all purine nucleotides are 2′-O-methyl purine nucleotides or alternately a plurality of purine nucleotides are 2′-O-methyl purine nucleotides).

[0117] In one embodiment, the invention features a chemically-modified short interfering nucleic acid (siNA) molecule of the invention capable of mediating RNA interference (RNAi) against a VEGF and/or VEGFr inside a cell or reconstituted in vitro system comprising a sense region, wherein one or more pyrimidine nucleotides present in the sense region are 2′-deoxy-2′-fluoro pyrimidine nucleotides (e.g., wherein all pyrimidine nucleotides are 2′-deoxy-2′-fluoro pyrimidine nucleotides or alternately a plurality of pyrimidine nucleotides are 2′-deoxy-2′-fluoro pyrimidine nucleotides), and one or more purine nucleotides present in the sense region are 2′-deoxy purine nucleotides (e.g., wherein all purine nucleotides are 2′-deoxy purine nucleotides or alternately a plurality of purine nucleotides are 2′-deoxy purine nucleotides), and an antisense region, wherein one or more pyrimidine nucleotides present in the antisense region are 2′-deoxy-2′-fluoro pyrimidine nucleotides (e.g., wherein all pyrimidine nucleotides are 2′-deoxy-2′-fluoro pyrimidine nucleotides or alternately a plurality of pyrimidine nucleotides are 2′-deoxy-2′-fluoro pyrimidine nucleotides), and one or more purine nucleotides present in the antisense region are 2′-O-methyl purine nucleotides (e.g., wherein all purine nucleotides are 2′-O-methyl purine nucleotides or alternately a plurality of purine nucleotides are 2′-O-methyl purine nucleotides). The sense region and/or the antisense region can have a terminal cap modification, such as any modification described herein or shown in FIG. 10, that is optionally present at the 3′-end, the 5′-end, or both of the 3′ and 5′-ends of the sense and/or antisense sequence. The sense and/or antisense region can optionally further comprise a 3′-terminal nucleotide overhang having about 1 to about 4 (e.g., about 1, 2, 3, or 4) 2′-deoxynucleotides. The overhang nucleotides can further comprise one or more (e.g., about 1, 2, 3, 4 or more) phosphorothioate, phosphonoacetate, and/or thiophosphonoacetate internucleotide linkages. Non-limiting examples of these chemically-modified siNAs are shown in FIGS. 4 and 5 and Tables III and IV herein. In any of these described embodiments, the purine nucleotides present in the sense region are alternatively 2′-O-methyl purine nucleotides (e.g., wherein all purine nucleotides are 2′-O-methyl purine nucleotides or alternately a plurality of purine nucleotides are 2′-O-methyl purine nucleotides) and one or more purine nucleotides present in the antisense region are 2′-O-methyl purine nucleotides (e.g., wherein all purine nucleotides are 2′-O-methyl purine nucleotides or alternately a plurality of purine nucleotides are 2′-O-methyl purine nucleotides). Also, in any of these embodiments, one or more purine nucleotides present in the sense region are alternatively purine ribonucleotides (e.g., wherein all purine nucleotides are purine ribonucleotides or alternately a plurality of purine nucleotides are purine ribonucleotides) and any purine nucleotides present in the antisense region are 2′-O-methyl purine nucleotides (e.g., wherein all purine nucleotides are 2′-O-methyl purine nucleotides or alternately a plurality of purine nucleotides are 2′-O-methyl purine nucleotides). Additionally, in any of these embodiments, one or more purine nucleotides present in the sense region and/or present in the antisense region are alternatively selected from the group consisting of 2′-deoxy nucleotides, locked nucleic acid (LNA) nucleotides, 2′-methoxyethyl nucleotides, 4′-thionucleotides, and 2′-O-methyl nucleotides (e.g., wherein all purine nucleotides are selected from the group consisting of 2′-deoxy nucleotides, locked nucleic acid (LNA) nucleotides, 2′-methoxyethyl nucleotides, 4′-thionucleotides, and 2′-O-methyl nucleotides or alternately a plurality of purine nucleotides are selected from the group consisting of 2′-deoxy nucleotides, locked nucleic acid (LNA) nucleotides, 2′-methoxyethyl nucleotides, 4′-thionucleotides, and 2′-O-methyl nucleotides).

[0118] In another embodiment, any modified nucleotides present in the siNA molecules of the invention, preferably in the antisense strand of the siNA molecules of the invention, but also optionally in the sense and/or both antisense and sense strands, comprise modified nucleotides having properties or characteristics similar to naturally occurring ribonucleotides. For example, the invention features siNA molecules including modified nucleotides having a Northern conformation (e.g., Northern pseudorotation cycle, see for example Saenger, Principles of Nucleic Acid Structure, Springer-Verlag ed., 1984). As such, chemically modified nucleotides present in the siNA molecules of the invention, preferably in the antisense strand of the siNA molecules of the invention, but also optionally in the sense and/or both antisense and sense strands, are resistant to nuclease degradation while at the same time maintaining the capacity to mediate RNAi. Non-limiting examples of nucleotides having a northern configuration include locked nucleic acid (LNA) nucleotides (e.g., 2′-O, 4′-C-methylene-(D-ribofuranosyl) nucleotides); 2′-methoxyethoxy (MOE) nucleotides; 2′-methyl-thio-ethyl, 2′-deoxy-2′-fluoro nucleotides, 2′-deoxy-2′-chloro nucleotides, 2′-azido nucleotides, and 2′-O-methyl nucleotides.

[0119] In one embodiment, the sense strand of a double stranded siNA molecule of the invention comprises a terminal cap moiety, (see for example FIG. 10) such as an inverted deoxyabaisc moiety, at the 3′-end, 5′-end, or both 3′ and 5′-ends of the sense strand.

[0120] In one embodiment, the invention features a chemically-modified short interfering nucleic acid molecule (siNA) capable of mediating RNA interference (RNAi) against a VEGF and/or VEGFr inside a cell or reconstituted in vitro system, wherein the chemical modification comprises a conjugate covalently attached to the chemically-modified siNA molecule. Non-limiting examples of conjugates contemplated by the invention include conjugates and ligands described in Vargeese et al., U.S. Ser. No. 10/427,160, filed April 30, 2003, incorporated by reference herein in its entirety, including the drawings. In another embodiment, the conjugate is covalently attached to the chemically-modified siNA molecule via a biodegradable linker. In one embodiment, the conjugate molecule is attached at the 3′-end of either the sense strand, the antisense strand, or both strands of the chemically-modified siNA molecule. In another embodiment, the conjugate molecule is attached at the 5′-end of either the sense strand, the antisense strand, or both strands of the chemically-modified siNA molecule. In yet another embodiment, the conjugate molecule is attached both the 3′-end and 5′-end of either the sense strand, the antisense strand, or both strands of the chemically-modified siNA molecule, or any combination thereof. In one embodiment, a conjugate molecule of the invention comprises a molecule that facilitates delivery of a chemically-modified siNA molecule into a biological system, such as a cell. In another embodiment, the conjugate molecule attached to the chemically-modified siNA molecule is a poly ethylene glycol, human serum albumin, or a ligand for a cellular receptor that can mediate cellular uptake. Examples of specific conjugate molecules contemplated by the instant invention that can be attached to chemically-modified siNA molecules are described in Vargeese et al., U.S. Ser. No. 10/201,394, incorporated by reference herein. The type of conjugates used and the extent of conjugation of siNA molecules of the invention can be evaluated for improved pharmacokinetic profiles, bioavailability, and/or stability of siNA constructs while at the same time maintaining the ability of the siNA to mediate RNAi activity. As such, one skilled in the art can screen siNA constructs that are modified with various conjugates to determine whether the siNA conjugate complex possesses improved properties while maintaining the ability to mediate RNAi, for example in animal models as are generally known in the art.

[0121] In one embodiment, the invention features a short interfering nucleic acid (siNA) molecule of the invention, wherein the siNA further comprises a nucleotide, non-nucleotide, or mixed nucleotide/non-nucleotide linker that joins the sense region of the siNA to the antisense region of the siNA. In one embodiment, a nucleotide linker of the invention can be a linker of ≧2 nucleotides in length, for example about 3, 4, 5, 6, 7, 8, 9, or 10 nucleotides in length. In another embodiment, the nucleotide linker can be a nucleic acid aptamer. By “aptamer” or “nucleic acid aptamer” as used herein is meant a nucleic acid molecule that binds specifically to a target molecule wherein the nucleic acid molecule has sequence that comprises a sequence recognized by the target molecule in its natural setting. Alternately, an aptamer can be a nucleic acid molecule that binds to a target molecule where the target molecule does not naturally bind to a nucleic acid. The target molecule can be any molecule of interest. For example, the aptamer can be used to bind to a ligand-binding domain of a protein, thereby preventing interaction of the naturally occurring ligand with the protein. This is a non-limiting example and those in the art will recognize that other embodiments can be readily generated using techniques generally known in the art. (See, for example, Gold et al., 1995, Annu. Rev. Biochem., 64, 763; Brody and Gold, 2000, J Biotechnol., 74, 5; Sun, 2000, Curr. Opin. Mol. Ther., 2, 100; Kusser, 2000, J Biotechnol., 74, 27; Hermann and Patel, 2000, Science, 287, 820; and Jayasena, 1999, Clinical Chemistry, 45, 1628.)

[0122] In yet another embodiment, a non-nucleotide linker of the invention comprises abasic nucleotide, polyether, polyamine, polyamide, peptide, carbohydrate, lipid, polyhydrocarbon, or other polymeric compounds (e.g. polyethylene glycols such as those having between 2 and 100 ethylene glycol units). Specific examples include those described by Seela and Kaiser, Nucleic Acids Res. 1990, 18:6353 and Nucleic Acids Res. 1987, 15:3113; Cload and Schepartz, J. Am. Chem. Soc. 1991, 113:6324; Richardson and Schepartz, J. Am. Chem. Soc. 1991, 113:5109; Ma et al., Nucleic Acids Res. 1993, 21:2585 and Biochemistry 1993, 32:1751; Durand et al., Nucleic Acids Res. 1990, 18:6353; McCurdy et al., Nucleosides & Nucleotides 1991, 10:287; Jschke et al., Tetrahedron Lett. 1993, 34:301; Ono et al., Biochemistry 1991, 30:9914; Arnold et al., International Publication No. WO 89/02439; Usman et al., International Publication No. WO 95/06731; Dudycz et al., International Publication No. WO 95/11910 and Ferentz and Verdine, J. Am. Chem. Soc. 1991, 113:4000, all hereby incorporated by reference herein. A “non-nucleotide” further means any group or compound that can be incorporated into a nucleic acid chain in the place of one or more nucleotide units, including either sugar and/or phosphate substitutions, and allows the remaining bases to exhibit their enzymatic activity. The group or compound can be abasic in that it does not contain a commonly recognized nucleotide base, such as adenosine, guanine, cytosine, uracil or thymine, for example at the C1 position of the sugar.

[0123] In one embodiment, the invention features a short interfering nucleic acid (siNA) molecule capable of mediating RNA interference (RNAi) inside a cell or reconstituted in vitro system, wherein one or both strands of the siNA molecule that are assembled from two separate oligonucleotides do not comprise any ribonucleotides. For example, a siNA molecule can be assembled from a single oligonculeotide where the sense and antisense regions of the siNA comprise separate oligonucleotides not having any ribonucleotides (e.g., nucleotides having a 2′-OH group) present in the oligonucleotides. In another example, a siNA molecule can be assembled from a single oligonculeotide where the sense and antisense regions of the siNA are linked or circularized by a nucleotide or non-nucleotide linker as described herein, wherein the oligonucleotide does not have any ribonucleotides (e.g., nucleotides having a 2′-OH group) present in the oligonucleotide. Applicant has surprisingly found that the presense of ribonucleotides (e.g., nucleotides having a 2′-hydroxyl group) within the siNA molecule is not required or essential to support RNAi activity. As such, in one embodiment, all positions within the siNA can include chemically modified nucleotides and/or non-nucleotides such as nucleotides and or non-nucleotides having Formula I, II, III, IV, V, VI, or VII or any combination thereof to the extent that the ability of the siNA molecule to support RNAi activity in a cell is maintained.

[0124] In one embodiment, a siNA molecule of the invention is a single stranded siNA molecule that mediates RNAi activity in a cell or reconstituted in vitro system comprising a single stranded polynucleotide having complementarity to a target nucleic acid sequence. In another embodiment, the single stranded siNA molecule of the invention comprises a 5′-terminal phosphate group. In another embodiment, the single stranded siNA molecule of the invention comprises a 5′-terminal phosphate group and a 3′-terminal phosphate group (e.g., a 2′,3′-cyclic phosphate). In another embodiment, the single stranded siNA molecule of the invention comprises about 19 to about 29 (e.g., about 19, 20, 21, 22, 23, 24, 25, 26, 27, 28, or 29) nucleotides. In yet another embodiment, the single stranded siNA molecule of the invention comprises one or more chemically modified nucleotides or non-nucleotides described herein. For example, all the positions within the siNA molecule can include chemically-modified nucleotides such as nucleotides having any of Formulae I-VII, or any combination thereof to the extent that the ability of the siNA molecule to support RNAi activity in a cell is maintained.

[0125] In once embodiment, a siNA molecule of the invention is a single stranded siNA molecule that mediates RNAi activity in a cell or reconstituted in vitro system comprising a single stranded polynucleotide having complementarity to a target nucleic acid sequence, wherein one or more pyrimidine nucleotides present in the siNA are 2′-deoxy-2′-fluoro pyrimidine nucleotides (e.g., wherein all pyrimidine nucleotides are 2′-deoxy-2′-fluoro pyrimidine nucleotides or alternately a plurality of pyrimidine nucleotides are 2′-deoxy-2′-fluoro pyrimidine nucleotides), and wherein any purine nucleotides present in the antisense region are 2′-O-methyl purine nucleotides (e.g., wherein all purine nucleotides are 2′-O-methyl purine nucleotides or alternately a plurality of purine nucleotides are 2′-O-methyl purine nucleotides), and a terminal cap modification, such as any modification described herein or shown in FIG. 10, that is optionally present at the 3′-end, the 5′-end, or both of the 3′ and 5′-ends of the antisense sequence. The siNA optionally further comprises about 1 to about 4 or more (e.g., about 1, 2, 3, 4 or more) terminal 2′-deoxynucleotides at the 3′-end of the siNA molecule, wherein the terminal nucleotides can further comprise one or more (e.g., 1, 2, 3, 4 or more) phosphorothioate, phosphonoacetate, and/or thiophosphonoacetate internucleotide linkages, and wherein the siNA optionally further comprises a terminal phosphate group, such as a 5′-terminal phosphate group. In any of these embodiments, any purine nucleotides present in the antisense region are alternatively 2′-deoxy purine nucleotides (e.g., wherein all purine nucleotides are 2′-deoxy purine nucleotides or alternately a plurality of purine nucleotides are 2′-deoxy purine nucleotides). Also, in any of these embodiments, any purine nucleotides present in the siNA (i.e., purine nucleotides present in the sense and/or antisense region) can alternatively be locked nucleic acid (LNA) nucleotides (e.g., wherein all purine nucleotides are LNA nucleotides or alternately a plurality of purine nucleotides are LNA nucleotides). Also, in any of these embodiments, any purine nucleotides present in the siNA are alternatively 2′-methoxyethyl purine nucleotides (e.g., wherein all purine nucleotides are 2′-methoxyethyl purine nucleotides or alternately a plurality of purine nucleotides are 2′-methoxyethyl purine nucleotides). In another embodiment, any modified nucleotides present in the single stranded siNA molecules of the invention comprise modified nucleotides having properties or characteristics similar to naturally occurring ribonucleotides. For example, the invention features siNA molecules including modified nucleotides having a Northern conformation (e.g., Northern pseudorotation cycle, see for example Saenger, Principles of Nucleic Acid Structure, Springer-Verlag ed., 1984). As such, chemically modified nucleotides present in the single stranded siNA molecules of the invention are preferably resistant to nuclease degradation while at the same time maintaining the capacity to mediate RNAi.

[0126] In one embodiment, the invention features a method for modulating the expression of a VEGF and/or VEGFr gene within a cell comprising: (a) synthesizing a siNA molecule of the invention, which can be chemically-modified, wherein one of the siNA strands comprises a sequence complementary to RNA of the VEGF and/or VEGFr gene; and (b) introducing the siNA molecule into a cell under conditions suitable to modulate the expression of the VEGF and/or VEGFr gene in the cell.

[0127] In one embodiment, the invention features a method for modulating the expression of a VEGF and/or VEGFr gene within a cell comprising: (a) synthesizing a siNA molecule of the invention, which can be chemically-modified, wherein one of the siNA strands comprises a sequence complementary to RNA of the VEGF and/or VEGFr gene and wherein the sense strand sequence of the siNA comprises a sequence identical or substantially similar to the sequence of the target RNA; and (b) introducing the siNA molecule into a cell under conditions suitable to modulate the expression of the VEGF and/or VEGFr gene in the cell.

[0128] In another embodiment, the invention features a method for modulating the expression of more than one VEGF and/or VEGFr gene within a cell comprising: (a) synthesizing siNA molecules of the invention, which can be chemically-modified, wherein one of the siNA strands comprises a sequence complementary to RNA of the VEGF and/or VEGFr genes; and (b) introducing the siNA molecules into a cell under conditions suitable to modulate the expression of the VEGF and/or VEGFr genes in the cell.

[0129] In another embodiment, the invention features a method for modulating the expression of two or more VEGF and/or VEGFr genes within a cell comprising: (a) synthesizing one or more siNA molecules of the invention, which can be chemically-modified, wherein the siNA strands comprise sequences complementary to RNA of the VEGF and/or VEGFr genes and wherein the sense strand sequences of the siNAs comprise sequences identical or substantially similar to the sequences of the target RNAs; and (b) introducing the siNA molecules into a cell under conditions suitable to modulate the expression of the VEGF and/or VEGFr genes in the cell.

[0130] In another embodiment, the invention features a method for modulating the expression of more than one VEGF and/or VEGFr gene within a cell comprising: (a) synthesizing a siNA molecule of the invention, which can be chemically-modified, wherein one of the siNA strands comprises a sequence complementary to RNA of the VEGF and/or VEGFr gene and wherein the sense strand sequence of the siNA comprises a sequence identical or substantially similar to the sequences of the target RNAs; and (b) introducing the siNA molecule into a cell under conditions suitable to modulate the expression of the VEGF and/or VEGFr genes in the cell.

[0131] In one embodiment, siNA molecules of the invention are used as reagents in ex vivo applications. For example, siNA reagents are introduced into tissue or cells that are transplanted into a subject for therapeutic effect. The cells and/or tissue can be derived from an organism or subject that later receives the explant, or can be derived from another organism or subject prior to transplantation. The siNA molecules can be used to modulate the expression of one or more genes in the cells or tissue, such that the cells or tissue obtain a desired phenotype or are able to perform a function when transplanted in vivo. In one embodiment, certain target cells from a patient are extracted. These extracted cells are contacted with siNAs targeting a specific nucleotide sequence within the cells under conditions suitable for uptake of the siNAs by these cells (e.g. using delivery reagents such as cationic lipids, liposomes and the like or using techniques such as electroporation to facilitate the delivery of siNAs into cells). The cells are then reintroduced back into the same patient or other patients. In one embodiment, the invention features a method of modulating the expression of a VEGF and/or VEGFr gene in a tissue explant comprising: (a) synthesizing a siNA molecule of the invention, which can be chemically-modified, wherein one of the siNA strands comprises a sequence complementary to RNA of the VEGF and/or VEGFr gene; and (b) introducing the siNA molecule into a cell of the tissue explant derived from a particular organism under conditions suitable to modulate the expression of the VEGF and/or VEGFr gene in the tissue explant. In another embodiment, the method further comprises introducing the tissue explant back into the organism the tissue was derived from or into another organism under conditions suitable to modulate the expression of the VEGF and/or VEGFr gene in that organism.

[0132] In one embodiment, the invention features a method of modulating the expression of a VEGF and/or VEGFr gene in a tissue explant comprising: (a) synthesizing a siNA molecule of the invention, which can be chemically-modified, wherein one of the siNA strands comprises a sequence complementary to RNA of the VEGF and/or VEGFr gene and wherein the sense strand sequence of the siNA comprises a sequence identical or substantially similar to the sequence of the target RNA; and (b) introducing the siNA molecule into a cell of the tissue explant derived from a particular organism under conditions suitable to modulate the expression of the VEGF and/or VEGFr gene in the tissue explant. In another embodiment, the method further comprises introducing the tissue explant back into the organism the tissue was derived from or into another organism under conditions suitable to modulate the expression of the VEGF and/or VEGFr gene in that organism.

[0133] In another embodiment, the invention features a method of modulating the expression of more than one VEGF and/or VEGFr gene in a tissue explant comprising: (a) synthesizing siNA molecules of the invention, which can be chemically-modified, wherein one of the siNA strands comprises a sequence complementary to RNA of the VEGF and/or VEGFr genes; and (b) introducing the siNA molecules into a cell of the tissue explant derived from a particular organism under conditions suitable to modulate the expression of the VEGF and/or VEGFr genes in the tissue explant. In another embodiment, the method further comprises introducing the tissue explant back into the organism the tissue was derived from or into another organism under conditions suitable to modulate the expression of the VEGF and/or VEGFr genes in that organism.

[0134] In one embodiment, the invention features a method of modulating the expression of a VEGF and/or VEGFr gene in an organism comprising: (a) synthesizing a siNA molecule of the invention, which can be chemically-modified, wherein one of the siNA strands comprises a sequence complementary to RNA of the VEGF and/or VEGFr gene; and (b) introducing the siNA molecule into the organism under conditions suitable to modulate the expression of the VEGF and/or VEGFr gene in the organism. The level of VEGF or VEGFr can be determined as is known in the art or as described in Pavco U.S. Ser. No. 10/438,493, incorporated by reference herein in its entirety including the drawings.

[0135] In another embodiment, the invention features a method of modulating the expression of more than one VEGF and/or VEGFr gene in an organism comprising: (a) synthesizing siNA molecules of the invention, which can be chemically-modified, wherein one of the siNA strands comprises a sequence complementary to RNA of the VEGF and/or VEGFr genes; and (b) introducing the siNA molecules into the organism under conditions suitable to modulate the expression of the VEGF and/or VEGFr genes in the organism. The level of VEGF or VEGFr can be determined as is known in the art or as described in Pavco U.S. Ser. No. 10/438,493, incorporated by reference herein in its entirety including the drawings.

[0136] In one embodiment, the invention features a method for modulating the expression of a VEGF and/or VEGFr gene within a cell comprising: (a) synthesizing a siNA molecule of the invention, which can be chemically-modified, wherein the siNA comprises a single stranded sequence having complementarity to RNA of the VEGF and/or VEGFr gene; and (b) introducing the siNA molecule into a cell under conditions suitable to modulate the expression of the VEGF and/or VEGFr gene in the cell.

[0137] In another embodiment, the invention features a method for modulating the expression of more than one VEGF and/or VEGFr gene within a cell comprising: (a) synthesizing siNA molecules of the invention, which can be chemically-modified, wherein the siNA comprises a single stranded sequence having complementarity to RNA of the VEGF and/or VEGFr gene; and (b) contacting the cell in vitro or in vivo with the siNA molecule under conditions suitable to modulate the expression of the VEGF and/or VEGFr genes in the cell.

[0138] In one embodiment, the invention features a method of modulating the expression of a VEGF and/or VEGFr gene in a tissue explant comprising: (a) synthesizing a siNA molecule of the invention, which can be chemically-modified, wherein the siNA comprises a single stranded sequence having complementarity to RNA of the VEGF and/or VEGFr gene; and (b) contacting the cell of the tissue explant derived from a particular organism with the siNA molecule under conditions suitable to modulate the expression of the VEGF and/or VEGFr gene in the tissue explant. In another embodiment, the method further comprises introducing the tissue explant back into the organism the tissue was derived from or into another organism under conditions suitable to modulate the expression of the VEGF and/or VEGFr gene in that organism.

[0139] In another embodiment, the invention features a method of modulating the expression of more than one VEGF and/or VEGFr gene in a tissue explant comprising: (a) synthesizing siNA molecules of the invention, which can be chemically-modified, wherein the siNA comprises a single stranded sequence having complementarity to RNA of the VEGF and/or VEGFr gene; and (b) introducing the siNA molecules into a cell of the tissue explant derived from a particular organism under conditions suitable to modulate the expression of the VEGF and/or VEGFr genes in the tissue explant. In another embodiment, the method further comprises introducing the tissue explant back into the organism the tissue was derived from or into another organism under conditions suitable to modulate the expression of the VEGF and/or VEGFr genes in that organism.

[0140] In one embodiment, the invention features a method of modulating the expression of a VEGF and/or VEGFr gene in an organism comprising: (a) synthesizing a siNA molecule of the invention, which can be chemically-modified, wherein the siNA comprises a single stranded sequence having complementarity to RNA of the VEGF and/or VEGFr gene; and (b) introducing the siNA molecule into the organism under conditions suitable to modulate the expression of the VEGF and/or VEGFr gene in the organism.

[0141] In another embodiment, the invention features a method of modulating the expression of more than one VEGF and/or VEGFr gene in an organism comprising: (a) synthesizing siNA molecules of the invention, which can be chemically-modified, wherein the siNA comprises a single stranded sequence having complementarity to RNA of the VEGF and/or VEGFr gene; and (b) introducing the siNA molecules into the organism under conditions suitable to modulate the expression of the VEGF and/or VEGFr genes in the organism.

[0142] In one embodiment, the invention features a method of modulating the expression of a VEGF and/or VEGFr gene in an organism comprising contacting the organism with a siNA molecule of the invention under conditions suitable to modulate the expression of the VEGF and/or VEGFr gene in the organism.

[0143] In another embodiment, the invention features a method of modulating the expression of more than one VEGF and/or VEGFr gene in an organism comprising contacting the organism with one or more siNA molecules of the invention under conditions suitable to modulate the expression of the VEGF and/or VEGFr genes in the organism.

[0144] The siNA molecules of the invention can be designed to down regulate or inhibit target (VEGF and/or VEGFr) gene expression through RNAi targeting of a variety of RNA molecules. In one embodiment, the siNA molecules of the invention are used to target various RNAs corresponding to a target gene. Non-limiting examples of such RNAs include messenger RNA (mRNA), alternate RNA splice variants of target gene(s), post-transcriptionally modified RNA of target gene(s), pre-mRNA of target gene(s), and/or RNA templates. If alternate splicing produces a family of transcripts that are distinguished by usage of appropriate exons, the instant invention can be used to inhibit gene expression through the appropriate exons to specifically inhibit or to distinguish among the functions of gene family members. For example, a protein that contains an alternatively spliced transmembrane domain can be expressed in both membrane bound and secreted forms. Use of the invention to target the exon containing the transmembrane domain can be used to determine the functional consequences of pharmaceutical targeting of membrane bound as opposed to the secreted form of the protein. Non-limiting examples of applications of the invention relating to targeting these RNA molecules include therapeutic pharmaceutical applications, pharmaceutical discovery applications, molecular diagnostic and gene function applications, and gene mapping, for example using single nucleotide polymorphism mapping with siNA molecules of the invention. Such applications can be implemented using known gene sequences or from partial sequences available from an expressed sequence tag (EST).

[0145] In another embodiment, the siNA molecules of the invention are used to target conserved sequences corresponding to a gene family or gene families such as VEGF and/or VEGFr family genes. As such, siNA molecules targeting multiple VEGF and/or VEGFr targets can provide increased therapeutic effect. In addition, siNA can be used to characterize pathways of gene function in a variety of applications. For example, the present invention can be used to inhibit the activity of target gene(s) in a pathway to determine the function of uncharacterized gene(s) in gene function analysis, mRNA function analysis, or translational analysis. The invention can be used to determine potential target gene pathways involved in various diseases and conditions toward pharmaceutical development. The invention can be used to understand pathways of gene expression involved in, for example, the progression and/or maintenance of cancer.

[0146] In one embodiment, siNA molecule(s) and/or methods of the invention are used to down regulate the expression of gene(s) that encode RNA referred to by Genbank Accession, for example VEGF and/or VEGFr genes encoding RNA sequence(s) referred to herein by Genbank Accession number, for example, Genbank Accession Nos. shown in Table I.

[0147] In one embodiment, the invention features a method comprising: (a) generating a library of siNA constructs having a predetermined complexity; and (b) assaying the siNA constructs of (a) above, under conditions suitable to determine RNAi target sites within the target RNA sequence. In one embodiment, the siNA molecules of (a) have strands of a fixed length, for example, about 23 nucleotides in length. In another embodiment, the siNA molecules of (a) are of differing length, for example having strands of about 19 to about 25 (e.g., about 19, 20, 21, 22, 23, 24, or 25) nucleotides in length. In one embodiment, the assay can comprise a reconstituted in vitro siNA assay as described herein. In another embodiment, the assay can comprise a cell culture system in which target RNA is expressed. In another embodiment, fragments of target RNA are analyzed for detectable levels of cleavage, for example by gel electrophoresis, northern blot analysis, or RNAse protection assays, to determine the most suitable target site(s) within the target RNA sequence. The target RNA sequence can be obtained as is known in the art, for example, by cloning and/or transcription for in vitro systems, and by cellular expression in in vivo systems.

[0148] In one embodiment, the invention features a method comprising: (a) generating a randomized library of siNA constructs having a predetermined complexity, such as of 4^{N}, where N represents the number of base paired nucleotides in each of the siNA construct strands (eg. for a siNA construct having 21 nucleotide sense and antisense strands with 19 base pairs, the complexity would be 4¹⁹); and (b) assaying the siNA constructs of (a) above, under conditions suitable to determine RNAi target sites within the target VEGF and/or VEGFr RNA sequence. In another embodiment, the siNA molecules of (a) have strands of a fixed length, for example about 23 nucleotides in length. In yet another embodiment, the siNA molecules of (a) are of differing length, for example having strands of about 19 to about 25 (e.g., about 19, 20, 21, 22, 23, 24, or 25) nucleotides in length. In one embodiment, the assay can comprise a reconstituted in vitro siNA assay as described in Example 7 herein. In another embodiment, the assay can comprise a cell culture system in which target RNA is expressed. In another embodiment, fragments of VEGF and/or VEGFr RNA are analyzed for detectable levels of cleavage, for example by gel electrophoresis, northern blot analysis, or RNAse protection assays, to determine the most suitable target site(s) within the target VEGF and/or VEGFr RNA sequence. The target VEGF and/or VEGFr RNA sequence can be obtained as is known in the art, for example, by cloning and/or transcription for in vitro systems, and by cellular expression in in vivo systems.

[0149] In another embodiment, the invention features a method comprising: (a) analyzing the sequence of a RNA target encoded by a target gene; (b) synthesizing one or more sets of siNA molecules having sequence complementary to one or more regions of the RNA of (a); and (c) assaying the siNA molecules of (b) under conditions suitable to determine RNAi targets within the target RNA sequence. In one embodiment, the siNA molecules of (b) have strands of a fixed length, for example about 23 nucleotides in length. In another embodiment, the siNA molecules of (b) are of differing length, for example having strands of about 19 to about 25 (e.g., about 19, 20, 21, 22, 23, 24, or 25) nucleotides in length. In one embodiment, the assay can comprise a reconstituted in vitro siNA assay as described herein. In another embodiment, the assay can comprise a cell culture system in which target RNA is expressed. Fragments of target RNA are analyzed for detectable levels of cleavage, for example by gel electrophoresis, northern blot analysis, or RNAse protection assays, to determine the most suitable target site(s) within the target RNA sequence. The target RNA sequence can be obtained as is known in the art, for example, by cloning and/or transcription for in vitro systems, and by expression in in vivo systems.

[0150] By “target site” is meant a sequence within a target RNA that is “targeted” for cleavage mediated by a siNA construct which contains sequences within its antisense region that are complementary to the target sequence.

[0151] By “detectable level of cleavage” is meant cleavage of target RNA (and formation of cleaved product RNAs) to an extent sufficient to discern cleavage products above the background of RNAs produced by random degradation of the target RNA. Production of cleavage products from 1-5% of the target RNA is sufficient to detect above the background for most methods of detection.

[0152] In one embodiment, the invention features a composition comprising a siNA molecule of the invention, which can be chemically-modified, in a pharmaceutically acceptable carrier or diluent. In another embodiment, the invention features a pharmaceutical composition comprising siNA molecules of the invention, which can be chemically-modified, targeting one or more genes in a pharmaceutically acceptable carrier or diluent. In another embodiment, the invention features a method for diagnosing a disease or condition in a subject comprising administering to the subject a composition of the invention under conditions suitable for the diagnosis of the disease or condition in the subject. In another embodiment, the invention features a method for treating or preventing a disease or condition in a subject, comprising administering to the subject a composition of the invention under conditions suitable for the treatment or prevention of the disease or condition in the subject, alone or in conjunction with one or more other therapeutic compounds. In yet another embodiment, the invention features a method for reducing or preventing tissue rejection in a subject comprising administering to the subject a composition of the invention under conditions suitable for the reduction or prevention of tissue rejection in the subject.

[0153] In another embodiment, the invention features a method for validating a VEGF and/or VEGFr gene target, comprising: (a) synthesizing a siNA molecule of the invention, which can be chemically-modified, wherein one of the siNA strands includes a sequence complementary to RNA of a VEGF and/or VEGFr target gene; (b) introducing the siNA molecule into a cell, tissue, or organism under conditions suitable for modulating expression of the VEGF and/or VEGFr target gene in the cell, tissue, or organism; and (c) determining the function of the gene by assaying for any phenotypic change in the cell, tissue, or organism.

[0154] In another embodiment, the invention features a method for validating a VEGF and/or VEGFr target comprising: (a) synthesizing a siNA molecule of the invention, which can be chemically-modified, wherein one of the siNA strands includes a sequence complementary to RNA of a VEGF and/or VEGFr target gene; (b) introducing the siNA molecule into a biological system under conditions suitable for modulating expression of the VEGF and/or VEGFr target gene in the biological system; and (c) determining the function of the gene by assaying for any phenotypic change in the biological system.

[0155] By “biological system” is meant, material, in a purified or unpurified form, from biological sources, including but not limited to human, animal, plant, insect, bacterial, viral or other sources, wherein the system comprises the components required for RNAi activity. The term “biological system” includes, for example, a cell, tissue, or organism, or extract thereof. The term biological system also includes reconstituted RNAi systems that can be used in an in vitro setting.

[0156] By “phenotypic change” is meant any detectable change to a cell that occurs in response to contact or treatment with a nucleic acid molecule of the invention (e.g., siNA). Such detectable changes include, but are not limited to, changes in shape, size, proliferation, motility, protein expression or RNA expression or other physical or chemical changes as can be assayed by methods known in the art. The detectable change can also include expression of reporter genes/molecules such as Green Florescent Protein (GFP) or various tags that are used to identify an expressed protein or any other cellular component that can be assayed.

[0157] In one embodiment, the invention features a kit containing a siNA molecule of the invention, which can be chemically-modified, that can be used to modulate the expression of a VEGF and/or VEGFr target gene in a biological system, including, for example, in a cell, tissue, or organism. In another embodiment, the invention features a kit containing more than one siNA molecule of the invention, which can be chemically-modified, that can be used to modulate the expression of more than one VEGF and/or VEGFr target gene in a biological system, including, for example, in a cell, tissue, or organism.

[0158] In one embodiment, the invention features a cell containing one or more siNA molecules of the invention, which can be chemically-modified. In another embodiment, the cell containing a siNA molecule of the invention is a mammalian cell. In yet another embodiment, the cell containing a siNA molecule of the invention is a human cell.

[0159] In one embodiment, the synthesis of a siNA molecule of the invention, which can be chemically-modified, comprises: (a) synthesis of two complementary strands of the siNA molecule; (b) annealing the two complementary strands together under conditions suitable to obtain a double-stranded siNA molecule. In another embodiment, synthesis of the two complementary strands of the siNA molecule is by solid phase oligonucleotide synthesis. In yet another embodiment, synthesis of the two complementary strands of the siNA molecule is by solid phase tandem oligonucleotide synthesis.

[0160] In one embodiment, the invention features a method for synthesizing a siNA duplex molecule comprising: (a) synthesizing a first oligonucleotide sequence strand of the siNA molecule, wherein the first oligonucleotide sequence strand comprises a cleavable linker molecule that can be used as a scaffold for the synthesis of the second oligonucleotide sequence strand of the siNA; (b) synthesizing the second oligonucleotide sequence strand of siNA on the scaffold of the first oligonucleotide sequence strand, wherein the second oligonucleotide sequence strand further comprises a chemical moiety than can be used to purify the siNA duplex; (c) cleaving the linker molecule of (a) under conditions suitable for the two siNA oligonucleotide strands to hybridize and form a stable duplex; and (d) purifying the siNA duplex utilizing the chemical moiety of the second oligonucleotide sequence strand. In one embodiment, cleavage of the linker molecule in (c) above takes place during deprotection of the oligonucleotide, for example under hydrolysis conditions using an alkylamine base such as methylamine. In one embodiment, the method of synthesis comprises solid phase synthesis on a solid support such as controlled pore glass (CPG) or polystyrene, wherein the first sequence of (a) is synthesized on a cleavable linker, such as a succinyl linker, using the solid support as a scaffold. The cleavable linker in (a) used as a scaffold for synthesizing the second strand can comprise similar reactivity as the solid support derivatized linker, such that cleavage of the solid support derivatized linker and the cleavable linker of (a) takes place concomitantly. In another embodiment, the chemical moiety of (b) that can be used to isolate the attached oligonucleotide sequence comprises a trityl group, for example a dimethoxytrityl group, which can be employed in a trityl-on synthesis strategy as described herein. In yet another embodiment, the chemical moiety, such as a dimethoxytrityl group, is removed during purification, for example, using acidic conditions.

[0161] In a further embodiment, the method for siNA synthesis is a solution phase synthesis or hybrid phase synthesis wherein both strands of the siNA duplex are synthesized in tandem using a cleavable linker attached to the first sequence which acts a scaffold for synthesis of the second sequence. Cleavage of the linker under conditions suitable for hybridization of the separate siNA sequence strands results in formation of the double-stranded siNA molecule.

[0162] In another embodiment, the invention features a method for synthesizing a siNA duplex molecule comprising: (a) synthesizing one oligonucleotide sequence strand of the siNA molecule, wherein the sequence comprises a cleavable linker molecule that can be used as a scaffold for the synthesis of another oligonucleotide sequence; (b) synthesizing a second oligonucleotide sequence having complementarity to the first sequence strand on the scaffold of (a), wherein the second sequence comprises the other strand of the double-stranded siNA molecule and wherein the second sequence further comprises a chemical moiety than can be used to isolate the attached oligonucleotide sequence; (c) purifying the product of (b) utilizing the chemical moiety of the second oligonucleotide sequence strand under conditions suitable for isolating the full-length sequence comprising both siNA oligonucleotide strands connected by the cleavable linker and under conditions suitable for the two siNA oligonucleotide strands to hybridize and form a stable duplex. In one embodiment, cleavage of the linker molecule in (c) above takes place during deprotection of the oligonucleotide, for example under hydrolysis conditions. In another embodiment, cleavage of the linker molecule in (c) above takes place after deprotection of the oligonucleotide. In another embodiment, the method of synthesis comprises solid phase synthesis on a solid support such as controlled pore glass (CPG) or polystyrene, wherein the first sequence of (a) is synthesized on a cleavable linker, such as a succinyl linker, using the solid support as a scaffold. The cleavable linker in (a) used as a scaffold for synthesizing the second strand can comprise similar reactivity or differing reactivity as the solid support derivatized linker, such that cleavage of the solid support derivatized linker and the cleavable linker of (a) takes place either concomitantly or sequentially. In one embodiment, the chemical moiety of (b) that can be used to isolate the attached oligonucleotide sequence comprises a trityl group, for example a dimethoxytrityl group.

[0163] In another embodiment, the invention features a method for making a double-stranded siNA molecule in a single synthetic process comprising: (a) synthesizing an oligonucleotide having a first and a second sequence, wherein the first sequence is complementary to the second sequence, and the first oligonucleotide sequence is linked to the second sequence via a cleavable linker, and wherein a terminal 5′-protecting group, for example, a 5′-O-dimethoxytrityl group (5′-O-DMT) remains on the oligonucleotide having the second sequence; (b) deprotecting the oligonucleotide whereby the deprotection results in the cleavage of the linker joining the two oligonucleotide sequences; and (c) purifying the product of (b) under conditions suitable for isolating the double-stranded siNA molecule, for example using a trityl-on synthesis strategy as described herein.

[0164] In another embodiment, the method of synthesis of siNA molecules of the invention comprises the teachings of Scaringe et al., U.S. Pat. Nos. 5,889,136; 6,008,400; and 6,111,086, incorporated by reference herein in their entirety.

[0165] In one embodiment, the invention features siNA constructs that mediate RNAi against a VEGF and/or VEGFr, wherein the siNA construct comprises one or more chemical modifications, for example, one or more chemical modifications having any of Formulae I-VII or any combination thereof that increases the nuclease resistance of the siNA construct.

[0166] In another embodiment, the invention features a method for generating siNA molecules with increased nuclease resistance comprising (a) introducing nucleotides having any of Formula I-VII or any combination thereof into a siNA molecule, and (b) assaying the siNA molecule of step (a) under conditions suitable for isolating siNA molecules having increased nuclease resistance.

[0167] In one embodiment, the invention features siNA constructs that mediate RNAi against a VEGF and/or VEGFr, wherein the siNA construct comprises one or more chemical modifications described herein that modulates the binding affinity between the sense and antisense strands of the siNA construct.

[0168] In another embodiment, the invention features a method for generating siNA molecules with increased binding affinity between the sense and antisense strands of the siNA molecule comprising (a) introducing nucleotides having any of Formula I-VII or any combination thereof into a siNA molecule, and (b) assaying the siNA molecule of step (a) under conditions suitable for isolating siNA molecules having increased binding affinity between the sense and antisense strands of the siNA molecule.

[0169] In one embodiment, the invention features siNA constructs that mediate RNAi against a VEGF and/or VEGFr, wherein the siNA construct comprises one or more chemical modifications described herein that modulates the binding affinity between the antisense strand of the siNA construct and a complementary target RNA sequence within a cell.

[0170] In one embodiment, the invention features siNA constructs that mediate RNAi against a VEGF and/or VEGFr, wherein the siNA construct comprises one or more chemical modifications described herein that modulates the binding affinity between the antisense strand of the siNA construct and a complementary target DNA sequence within a cell.

[0171] In another embodiment, the invention features a method for generating siNA molecules with increased binding affinity between the antisense strand of the siNA molecule and a complementary target RNA sequence comprising (a) introducing nucleotides having any of Formula I-VII or any combination thereof into a siNA molecule, and (b) assaying the siNA molecule of step (a) under conditions suitable for isolating siNA molecules having increased binding affinity between the antisense strand of the siNA molecule and a complementary target RNA sequence.

[0172] In another embodiment, the invention features a method for generating siNA molecules with increased binding affinity between the antisense strand of the siNA molecule and a complementary target DNA sequence comprising (a) introducing nucleotides having any of Formula I-VII or any combination thereof into a siNA molecule, and (b) assaying the siNA molecule of step (a) under conditions suitable for isolating siNA molecules having increased binding affinity between the antisense strand of the siNA molecule and a complementary target DNA sequence.

[0173] In one embodiment, the invention features siNA constructs that mediate RNAi against a VEGF and/or VEGFr, wherein the siNA construct comprises one or more chemical modifications described herein that modulate the polymerase activity of a cellular polymerase capable of generating additional endogenous siNA molecules having sequence homology to the chemically-modified siNA construct.

[0174] In another embodiment, the invention features a method for generating siNA molecules capable of mediating increased polymerase activity of a cellular polymerase capable of generating additional endogenous siNA molecules having sequence homology to a chemically-modified siNA molecule comprising (a) introducing nucleotides having any of Formula I-VII or any combination thereof into a siNA molecule, and (b) assaying the siNA molecule of step (a) under conditions suitable for isolating siNA molecules capable of mediating increased polymerase activity of a cellular polymerase capable of generating additional endogenous siNA molecules having sequence homology to the chemically-modified siNA molecule.

[0175] In one embodiment, the invention features chemically-modified siNA constructs that mediate RNAi against a VEGF and/or VEGFr in a cell, wherein the chemical modifications do not significantly effect the interaction of siNA with a target RNA molecule, DNA molecule and/or proteins or other factors that are essential for RNAi in a manner that would decrease the efficacy of RNAi mediated by such siNA constructs.

[0176] In another embodiment, the invention features a method for generating siNA molecules with improved RNAi activity against VEGF and/or VEGFr comprising (a) introducing nucleotides having any of Formula I-VII or any combination thereof into a siNA molecule, and (b) assaying the siNA molecule of step (a) under conditions suitable for isolating siNA molecules having improved RNAi activity.

[0177] In yet another embodiment, the invention features a method for generating siNA molecules with improved RNAi activity against a VEGF and/or VEGFr target RNA comprising (a) introducing nucleotides having any of Formula I-VII or any combination thereof into a siNA molecule, and (b) assaying the siNA molecule of step (a) under conditions suitable for isolating siNA molecules having improved RNAi activity against the target RNA.

[0178] In yet another embodiment, the invention features a method for generating siNA molecules with improved RNAi activity against a VEGF and/or VEGFr target DNA comprising (a) introducing nucleotides having any of Formula I-VII or any combination thereof into a siNA molecule, and (b) assaying the siNA molecule of step (a) under conditions suitable for isolating siNA molecules having improved RNAi activity against the target DNA.

[0179] In one embodiment, the invention features siNA constructs that mediate RNAi against a VEGF and/or VEGFr, wherein the siNA construct comprises one or more chemical modifications described herein that modulates the cellular uptake of the siNA construct.

[0180] In another embodiment, the invention features a method for generating siNA molecules against VEGF and/or VEGFr with improved cellular uptake comprising (a) introducing nucleotides having any of Formula I-VII or any combination thereof into a siNA molecule, and (b) assaying the siNA molecule of step (a) under conditions suitable for isolating siNA molecules having improved cellular uptake.

[0181] In one embodiment, the invention features siNA constructs that mediate RNAi against a VEGF and/or VEGFr, wherein the siNA construct comprises one or more chemical modifications described herein that increases the bioavailability of the siNA construct, for example, by attaching polymeric conjugates such as polyethyleneglycol or equivalent conjugates that improve the pharmacokinetics of the siNA construct, or by attaching conjugates that target specific tissue types or cell types in vivo. Non-limiting examples of such conjugates are described in Vargeese et al., U.S. Ser. No. 10/201,394 incorporated by reference herein.

[0182] In one embodiment, the invention features a method for generating siNA molecules of the invention with improved bioavailability, comprising (a) introducing a conjugate into the structure of a siNA molecule, and (b) assaying the siNA molecule of step (a) under conditions suitable for isolating siNA molecules having improved bioavailability. Such conjugates can include ligands for cellular receptors, such as peptides derived from naturally occurring protein ligands; protein localization sequences, including cellular ZIP code sequences; antibodies; nucleic acid aptamers; vitamins and other co-factors, such as folate and N-acetylgalactosamine; polymers, such as polyethyleneglycol (PEG); phospholipids; cholesterol; polyamines, such as spermine or spermidine; and others.

[0183] In one embodiment, the invention features a double stranded short interfering nucleic acid (siNA) molecule that comprises a first nucleotide sequence complementary to a target RNA sequence or a portion thereof, and a second sequence having complementarity to said first sequence, wherein said second sequence is chemically modified in a manner that it can no longer act as a guide sequence for efficiently mediating RNA interference and/or be recognized by cellular proteins that facilitate RNAi.

[0184] In one embodiment, the invention features a double stranded short interfering nucleic acid (siNA) molecule that comprises a first nucleotide sequence complementary to a target RNA sequence or a portion thereof, and a second sequence having complementarity to said first sequence, wherein the second sequence is designed or modified in a manner that prevents its entry into the RNAi pathway as a guide sequence or as a sequence that is complementary to a target nucleic acid (e.g., RNA) sequence. Such design or modifications are expected to enhance the activity of siNA and/or improve the specificity of siNA molecules of the invention. These modifications are also expected to minimize any off-target effects and/or associated toxicity.

[0185] In one embodiment, the invention features a double stranded short interfering nucleic acid (siNA) molecule that comprises a first nucleotide sequence complementary to a target RNA sequence or a portion thereof, and a second sequence having complementarity to said first sequence, wherein said second sequence is incapable of acting as a guide sequence for mediating RNA interference.

[0186] In one embodiment, the invention features a double stranded short interfering nucleic acid (siNA) molecule that comprises a first nucleotide sequence complementary to a target RNA sequence or a portion thereof, and a second sequence having complementarity to said first sequence, wherein said second sequence does not have a terminal 5′-hydroxyl (5′-OH) or 5′-phosphate group.

[0187] In one embodiment, the invention features a double stranded short interfering nucleic acid (siNA) molecule that comprises a first nucleotide sequence complementary to a target RNA sequence or a portion thereof, and a second sequence having complementarity to said first sequence, wherein said second sequence comprises a terminal cap moiety at the 5′-end of said second sequence. In another embodiment, the terminal cap moiety comprises an inverted abasic, inverted deoxy abasic, inverted nucleotide moiety, a group shown in FIG. 10, an alkyl or cycloalkyl group, a heterocycle, or any other group that prevents RNAi activity in which the second sequence serves as a guide sequence or template for RNAi.

[0188] In one embodiment, the invention features a double stranded short interfering nucleic acid (siNA) molecule that comprises a first nucleotide sequence complementary to a target RNA sequence or a portion thereof, and a second sequence having complementarity to said first sequence, wherein said second sequence comprises a terminal cap moiety at the 5′-end and 3′-end of said second sequence. In another embodiment, each terminal cap moiety individually comprises an inverted abasic, inverted deoxy abasic, inverted nucleotide moiety, a group shown in FIG. 10, an alkyl or cycloalkyl group, a heterocycle, or any other group that prevents RNAi activity in which the second sequence serves as a guide sequence or template for RNAi.

[0189] In one embodiment, the invention features a method for generating siNA molecules of the invention with improved specificity for down regulating or inhibiting the expression of a target nucleic acid (e.g., a DNA or RNA such as a gene or its corresponding RNA), comprising (a) introducing one or more chemical modifications into the structure of a siNA molecule, and (b) assaying the siNA molecule of step (a) under conditions suitable for isolating siNA molecules having improved specificity. In another embodiment, the chemical modification used to improve specificity comprises terminal cap modifications at the 5′-end, 3′-end, or both 5′ and 3′-ends of the siNA molecule. The terminal cap modifications can comprise, for example, structures shown in FIG. 10 (e.g. inverted deoxyabasic moieties) or any other chemical modification that renders a portion of the siNA molecule (e.g. the sense strand) incapable of mediating RNA interference against an off target nucleic acid sequence. In a non-limiting example, a siNA molecule is designed such that only the antisense sequence of the siNA molecule can serve as a guide sequence for RISC (is RISC described herein?) mediated degradation of a corresponding target RNA sequence. This can be accomplished by rendering the sense sequence of the siNA inactive by introducing chemical modifications to the sense strand that preclude recognition of the sense strand as a guide sequence by RNAi machinery. In one embodiment, such chemical modifications comprise any chemical group at the 5′-end of the sense strand of the siNA, or any other group that serves to render the sense strand inactive as a guide sequence for mediating RNA interference. These modifications, for example, can result in a molecule where the 5′-end of the sense strand no longer has a free 5′-hydroxyl (5′-OH) or a free 5′-phosphate group (e.g., phosphate, diphosphate, triphosphate, cyclic phosphate etc.). Non-limiting examples of such siNA constructs are described herein, such as “Stab 9/10”, “Stab 7/8”, “Stab 7/19” and “Stab 17/22” chemistries and variants thereof wherein the 5′-end and 3′-end of the sense strand of the siNA do not comprise a hydroxyl group or phosphate group.

[0190] In one embodiment, the invention features a method for generating siNA molecules of the invention with improved specificity for down regulating or inhibiting the expression of a target nucleic acid (e.g., a DNA or RNA such as a gene or its corresponding RNA), comprising introducing one or more chemical modifications into the structure of a siNA molecule that prevent a strand or portion of the siNA molecule from acting as a template or guide sequence for RNAi activity. In one embodiment, the inactive strand or sense region of the siNA molecule is the sense strand or sense region of the siNA molecule, i.e. the strand or region of the siNA that does not have complementarity to the target nucleic acid sequence. In one embodiment, such chemical modifications comprise any chemical group at the 5′-end of the sense strand or region of the siNA that does not comprise a 5′-hydroxyl (5′-OH) or 5′-phosphate group, or any other group that serves to render the sense strand or sense region inactive as a guide sequence for mediating RNA interference. Non-limiting examples of such siNA constructs are described herein, such as “Stab 9/10”, “Stab 7/8”, “Stab 7/19” and “Stab 17/22” chemistries and variants thereof wherein the 5′-end and 3′-end of the sense strand of the siNA do not comprise a hydroxyl group or phosphate group.

[0191] In one embodiment, the invention features a method for screening siNA molecules that are active in mediating RNA interference against a target nucleic acid sequence comprising, (a) generating a plurality of unmodified siNA molecules, (b) assaying the siNA molecules of step (a) under conditions suitable for isolating siNA molecules that are active in mediating RNA interference against the target nucleic acid sequence, (c) introducing chemical modifications (e.g. chemical modifications as described herein or as otherwise known in the art) into the active siNA molecules of (b), and (d) optionally re-screening the chemically modified siNA molecules of (c) under conditions suitable for isolating chemically modified siNA molecules that are active in mediating RNA interference against the target nucleic acid sequence.

[0192] In one embodiment, the invention features a method for screening chemically modified siNA molecules that are active in mediating RNA interference against a target nucleic acid sequence comprising, (a) generating a plurality of chemically modified siNA molecules (e.g. siNA molecules as described herein or as otherwise known in the art), and (b) assaying the siNA molecules of step (a) under conditions suitable for isolating chemically modified siNA molecules that are active in mediating RNA interference against the target nucleic acid sequence.

[0193] The term “ligand” refers to any compound or molecule, such as a drug, peptide, hormone, or neurotransmitter, that is capable of interacting with another compound, such as a receptor, either directly or indirectly. The receptor that interacts with a ligand can be present on the surface of a cell or can alternately be an intercullular receptor. Interaction of the ligand with the receptor can result in a biochemical reaction, or can simply be a physical interaction or association.

[0194] In another embodiment, the invention features a method for generating siNA molecules of the invention with improved bioavailability comprising (a) introducing an excipient formulation to a siNA molecule, and (b) assaying the siNA molecule of step (a) under conditions suitable for isolating siNA molecules having improved bioavailability. Such excipients include polymers such as cyclodextrins, lipids, cationic lipids, polyamines, phospholipids, nanoparticles, receptors, ligands, and others.

[0195] In another embodiment, the invention features a method for generating siNA molecules of the invention with improved bioavailability comprising (a) introducing nucleotides having any of Formulae I-VII or any combination thereof into a siNA molecule, and (b) assaying the siNA molecule of step (a) under conditions suitable for isolating siNA molecules having improved bioavailability.

[0196] In another embodiment, polyethylene glycol (PEG) can be covalently attached to siNA compounds of the present invention. The attached PEG can be any molecular weight, preferably from about 2,000 to about 50,000 daltons (Da).

[0197] The present invention can be used alone or as a component of a kit having at least one of the reagents necessary to carry out the in vitro or in vivo introduction of RNA to test samples and/or subjects. For example, preferred components of the kit include a siNA molecule of the invention and a vehicle that promotes introduction of the siNA into cells of interest as described herein (e.g., using lipids and other methods of transfection known in the art, see for example Beigelman et al, U.S. Pat. No. 6,395,713). The kit can be used for target validation, such as in determining gene function and/or activity, or in drug optimization, and in drug discovery (see for example Usman et al., U.S. Ser. No. 60/402,996). Such a kit can also include instructions to allow a user of the kit to practice the invention.

[0198] The term “short interfering nucleic acid”, “siNA”, “short interfering RNA”, “siRNA”, “short interfering nucleic acid molecule”, “short interfering oligonucleotide molecule”, or “chemically-modified short interfering nucleic acid molecule” as used herein refers to any nucleic acid molecule capable of inhibiting or down regulating gene expression or viral replication, for example by mediating RNA interference “RNAi” or gene silencing in a sequence-specific manner; see for example Bass, 2001, Nature, 411, 428-429; Elbashir et al., 2001, Nature, 411, 494-498; and Kreutzer et al., International PCT Publication No. WO 00/44895; Zernicka-Goetz et al., International PCT Publication No. WO 01/36646; Fire, International PCT Publication No. WO 99/32619; Plaetinck et al., International PCT Publication No. WO 00/01846; Mello and Fire, International PCT Publication No. WO 01/29058; Deschamps-Depaillette, International PCT Publication No. WO 99/07409; and Li et al., International PCT Publication No. WO 00/44914; Allshire, 2002, Science, 297, 1818-1819; Volpe et al., 2002, Science, 297, 1833-1837; Jenuwein, 2002, Science, 297, 2215-2218; and Hall et al., 2002, Science, 297, 2232-2237; Hutvagner and Zamore, 2002, Science, 297, 2056-60; McManus et al., 2002, RNA, 8, 842-850; Reinhart et al., 2002, Gene & Dev., 16, 1616-1626; and Reinhart & Bartel, 2002, Science, 297, 1831). Non limiting examples of siNA molecules of the invention are shown in FIGS. 4-6, and Tables II, III, and IV herein. For example the siNA can be a double-stranded polynucleotide molecule comprising self-complementary sense and antisense regions, wherein the antisense region comprises nucleotide sequence that is complementary to nucleotide sequence in a target nucleic acid molecule or a portion thereof and the sense region having nucleotide sequence corresponding to the target nucleic acid sequence or a portion thereof. The siNA can be assembled from two separate oligonucleotides, where one strand is the sense strand and the other is the antisense strand, wherein the antisense and sense strands are self-complementary (i.e. each strand comprises nucleotide sequence that is complementary to nucleotide sequence in the other strand; such as where the antisense strand and sense strand form a duplex or double stranded structure, for example wherein the double stranded region is about 19 base pairs); the antisense strand comprises nucleotide sequence that is complementary to nucleotide sequence in a target nucleic acid molecule or a portion thereof and the sense strand comprises nucleotide sequence corresponding to the target nucleic acid sequence or a portion thereof. Alternatively, the siNA is assembled from a single oligonucleotide, where the self-complementary sense and antisense regions of the siNA are linked by means of a nucleic acid based or non-nucleic acid-based linker(s). The siNA can be a polynucleotide with a duplex, asymmetric duplex, hairpin or asymmetric hairpin secondary structure, having self-complementary sense and antisense regions, wherein the antisense region comprises nucleotide sequence that is complementary to nucleotide sequence in a separate target nucleic acid molecule or a portion thereof and the sense region having nucleotide sequence corresponding to the target nucleic acid sequence or a portion thereof. The siNA can be a circular single-stranded polynucleotide having two or more loop structures and a stem comprising self-complementary sense and antisense regions, wherein the antisense region comprises nucleotide sequence that is complementary to nucleotide sequence in a target nucleic acid molecule or a portion thereof and the sense region having nucleotide sequence corresponding to the target nucleic acid sequence or a portion thereof, and wherein the circular polynucleotide can be processed either in vivo or in vitro to generate an active siNA molecule capable of mediating RNAi. The siNA can also comprise a single stranded polynucleotide having nucleotide sequence complementary to nucleotide sequence in a target nucleic acid molecule or a portion thereof (for example, where such siNA molecule does not require the presence within the siNA molecule of nucleotide sequence corresponding to the target nucleic acid sequence or a portion thereof), wherein the single stranded polynucleotide can further comprise a terminal phosphate group, such as a 5′-phosphate (see for example Martinez et al., 2002, Cell., 110, 563-574 and Schwarz et al., 2002, Molecular Cell, 10, 537-568), or 5′,3′-diphosphate. In certain embodiment, the siNA molecule of the invention comprises separate sense and antisense sequences or regions, wherein the sense and antisense regions are covalently linked by nucleotide or non-nucleotide linkers molecules as is known in the art, or are alternately non-covalently linked by ionic interactions, hydrogen bonding, van der waals interactions, hydrophobic intercations, and/or stacking interactions. In certain embodiments, the siNA molecules of the invention comprise nucleotide sequence that is complementary to nucleotide sequence of a target gene. In another embodiment, the siNA molecule of the invention interacts with nucleotide sequence of a target gene in a manner that causes inhibition of expression of the target gene. As used herein, siNA molecules need not be limited to those molecules containing only RNA, but further encompasses chemically-modified nucleotides and non-nucleotides. In certain embodiments, the short interfering nucleic acid molecules of the invention lack 2′-hydroxy (2′-OH) containing nucleotides. Applicant describes in certain embodiments short interfering nucleic acids that do not require the presence of nucleotides having a 2′-hydroxy group for mediating RNAi and as such, short interfering nucleic acid molecules of the invention optionally do not include any ribonucleotides (e.g., nucleotides having a 2′-OH group). Such siNA molecules that do not require the presence of ribonucleotides within the siNA molecule to support RNAi can however have an attached linker or linkers or other attached or associated groups, moieties, or chains containing one or more nucleotides with 2′-OH groups. Optionally, siNA molecules can comprise ribonucleotides at about 5, 10, 20, 30, 40, or 50% of the nucleotide positions. The modified short interfering nucleic acid molecules of the invention can also be referred to as short interfering modified oligonucleotides “siMON.” As used herein, the term siNA is meant to be equivalent to other terms used to describe nucleic acid molecules that are capable of mediating sequence specific RNAi, for example short interfering RNA (siRNA), double-stranded RNA (dsRNA), micro-RNA (miRNA), short hairpin RNA (shRNA), short interfering oligonucleotide, short interfering nucleic acid, short interfering modified oligonucleotide, chemically-modified siRNA, post-transcriptional gene silencing RNA (ptgsRNA), and others. In addition, as used herein, the term RNAi is meant to be equivalent to other terms used to describe sequence specific RNA interference, such as post transcriptional gene silencing, translational inhibition, or epigenetics. For example, siNA molecules of the invention can be used to epigenetically silence genes at both the post-transcriptional level or the pre-transcriptional level. In a non-limiting example, epigenetic regulation of gene expression by siNA molecules of the invention can result from siNA mediated modification of chromatin structure to alter gene expression (see, for example, Allshire, 2002, Science, 297, 1818-1819; Volpe et al., 2002, Science, 297, 1833-1837; Jenuwein, 2002, Science, 297, 2215-2218; and Hall et al., 2002, Science, 297, 2232-2237).

[0199] By “asymmetric hairpin” as used herein is meant a linear siNA molecule comprising an antisense region, a loop portion that can comprise nucleotides or non-nucleotides, and a sense region that comprises fewer nucleotides than the antisense region to the extent that the sense region has enough complementary nucleotides to base pair with the antisense region and form a duplex with loop. For example, an asymmetric hairpin siNA molecule of the invention can comprise an antisense region having length sufficient to mediate RNAi in a cell or in vitro system (e.g. about 19 to about 22 (e.g., about 19, 20, 21, or 22) nucleotides) and a loop region comprising about 4 to about 8 (e.g., about 4, 5, 6, 7, or 8) nucleotides, and a sense region having about 3 to about 18 (e.g., about 3, 4, 5, 6, 7, 8, 9, 10, 11, 12, 13, 14, 15, 16, 17, or 18) nucleotides that are complementary to the antisense region. The asymmetric hairpin siNA molecule can also comprise a 5′-terminal phosphate group that can be chemically modified. The loop portion of the asymmetric hairpin siNA molecule can comprise nucleotides, non-nucleotides, linker molecules, or conjugate molecules as described herein.

[0200] By “asymmetric duplex” as used herein is meant a siNA molecule having two separate strands comprising a sense region and an antisense region, wherein the sense region comprises fewer nucleotides than the antisense region to the extent that the sense region has enough complementary nucleotides to base pair with the antisense region and form a duplex. For example, an asymmetric duplex siNA molecule of the invention can comprise an antisense region having length sufficient to mediate RNAi in a cell or in vitro system (e.g. about 19 to about 22 (e.g. about 19, 20, 21, or 22) nucleotides) and a sense region having about 3 to about 18 (e.g., about 3, 4, 5, 6, 7, 8, 9, 10, 11, 12, 13, 14, 15, 16, 17, or 18) nucleotides that are complementary to the antisense region.

[0201] By “modulate” is meant that the expression of the gene, or level of RNA molecule or equivalent RNA molecules encoding one or more proteins or protein subunits, or activity of one or more proteins or protein subunits is up regulated or down regulated, such that expression, level, or activity is greater than or less than that observed in the absence of the modulator. For example, the term “modulate” can mean “inhibit,” but the use of the word “modulate” is not limited to this definition.

[0202] By “inhibit”, “down-regulate”, or “reduce”, it is meant that the expression of the gene, or level of RNA molecules or equivalent RNA molecules encoding one or more proteins or protein subunits, or activity of one or more proteins or protein subunits, is reduced below that observed in the absence of the nucleic acid molecules (e.g., siNA) of the invention. In one embodiment, inhibition, down-regulation or reduction with an siNA molecule is below that level observed in the presence of an inactive or attenuated molecule. In another embodiment, inhibition, down-regulation, or reduction with siNA molecules is below that level observed in the presence of, for example, an siNA molecule with scrambled sequence or with mismatches. In another embodiment, inhibition, down-regulation, or reduction of gene expression with a nucleic acid molecule of the instant invention is greater in the presence of the nucleic acid molecule than in its absence.

[0203] By “gene”, or “target gene”, is meant, a nucleic acid that encodes an RNA, for example, nucleic acid sequences including, but not limited to, structural genes encoding a polypeptide. A gene or target gene can also encode a functional RNA (FRNA) or non-coding RNA (ncRNA), such as small temporal RNA (stRNA), micro RNA (miRNA), small nuclear RNA (snRNA), short interfering RNA (siRNA), small nucleolar RNA (snRNA), ribosomal RNA (rRNA), transfer RNA (tRNA) and precursor RNAs thereof. Such non-coding RNAs can serve as target nucleic acid molecules for siNA mediated RNA interference in modulating the activity of FRNA or ncRNA involved in functional or regulatory cellular processes. Abberant FRNA or ncRNA activity leading to disease can therefore be modulated by siNA molecules of the invention. siNA molecules targeting FRNA and ncRNA can also be used to manipulate or alter the genotype or phenotype of an organism or cell, by intervening in cellular processes such as genetic imprinting, transcription, translation, or nucleic acid processing (e.g., transamination, methylation etc.). The target gene can be a gene derived from a cell, an endogenous gene, a transgene, or exogenous genes such as genes of a pathogen, for example a virus, which is present in the cell after infection thereof. The cell containing the target gene can be derived from or contained in any organism, for example a plant, animal, protozoan, virus, bacterium, or fungus. Non-limiting examples of plants include monocots, dicots, or gymnosperms. Non-limiting examples of animals include vertebrates or invertebrates. Non-limiting examples of fungi include molds or yeasts.

[0204] By “VEGF” as used herein is meant, any vascular endothelial growth factor (e.g., VEGF, VEGF-A, VEGF-B, VEGF-C, VEGF-D) protein, peptide, or polypeptide having vascular endothelial growth factor activity, such as encoded by VEGF Genbank Accession Nos. shown in Table I. The term VEGF also refers to nucleic acid sequences encloding any vascular endothelial growth factor protein, peptide, or polypeptide having vascular endothelial growth factor activity.

[0205] By “VEGF-B” is meant, protein, peptide, or polypeptide receptor or a derivative thereof, such as encoded by Genbank Accession No. NM_{—}003377, having vascular endothelial growth factor type B activity. The term VEGF-B also refers to nucleic acid sequences encloding any VEGF-B protein, peptide, or polypeptide having VEGF-B activity.

[0206] By “VEGF-C” is meant, protein, peptide, or polypeptide receptor or a derivative thereof, such as encoded by Genbank Accession No. NM_{—}005429, having vascular endothelial growth factor type C activity. The term VEGF-C also refers to nucleic acid sequences encloding any VEGF-C protein, peptide, or polypeptide having VEGF-C activity.

[0207] By “VEGF-D” is meant, protein, peptide, or polypeptide receptor or a derivative thereof, such as encoded by Genbank Accession No. NM_{—}004469, having vascular endothelial growth factor type D activity. The term VEGF-D also refers to nucleic acid sequences encloding any VEGF-D protein, peptide, or polypeptide having VEGF-D activity.

[0208] By “VEGFr” as used herein is meant, any vascular endothelial growth factor receptor protein, peptide, or polypeptide (e.g., VEGFr1, VEGFr2, or VEGFr3, including both membrane bound and/or soluble forms thereof) having vascular endothelial growth factor receptor activity, such as encoded by VEGFr Genbank Accession Nos. shown in Table I. The term VEGFr also refers to nucleic acid sequences encloding any vascular endothelial growth factor receptor protein, peptide, or polypeptide having vascular endothelial growth factor receptor activity.

[0209] By “VEGFr1” is meant, protein, peptide, or polypeptide receptor or a derivative thereof, such as encoded by Genbank Accession No. NM_{—}002019, having vascular endothelial growth factor receptor type 1 (flt) activity, for example, having the ability to bind a vascular endothelial growth factor. The term VEGF1 also refers to nucleic acid sequences encloding any VEGFr1 protein, peptide, or polypeptide having VEGFr1 activity.

[0210] By “VEGFr2” is meant, protein, peptide, or polypeptide receptor or a derivative thereof, such as encoded by Genbank Accession No. NM_{—}002253, having vascular endothelial growth factor receptor type 2 (kdr) activity, for example, having the ability to bind a vascular endothelial growth factor. The term VEGF2 also refers to nucleic acid sequences encloding any VEGFr2 protein, peptide, or polypeptide having VEGFr2 activity.

[0211] By “VEGFr3” is meant, protein, peptide, or polypeptide receptor or a derivative thereof, such as encoded by Genbank Accession No. NM_{—}002020 having vascular endothelial growth factor receptor type 3 (kdr) activity, for example, having the ability to bind a vascular endothelial growth factor. The term VEGF3 also refers to nucleic acid sequences encloding any VEGFr3 protein, peptide, or polypeptide having VEGFr3 activity.

[0212] By “homologous sequence” is meant, a nucleotide sequence that is shared by one or more polynucleotide sequences, such as genes, gene transcripts and/or non-coding polynucleotides. For example, a homologous sequence can be a nucleotide sequence that is shared by two or more genes encoding related but different proteins, such as different members of a gene family (e.g., VEGF receptors such as VEGFr1, VEGFr2, and/or VEGFr3), different protein epitopes, different protein isoforms (e.g., VEGF A, B, C, and/or D) or completely divergent genes, such as a cytokine and its corresponding receptors (e.g., VEGF and VEGF receptors). A homologous sequence can be a nucleotide sequence that is shared by two or more non-coding polynucleotides, such as noncoding DNA or RNA, regulatory sequences, introns, and sites of transcriptional control or regulation. Homologous sequences can also include conserved sequence regions shared by more than one polynucleotide sequence. Homology does not need to be perfect homology (e.g., 100%), as partially homologous sequences are also contemplated by the instant invention (e.g., 99%, 98%, 97%, 96%, 95%, 94%, 93%, 92%, 91%, 90%, 89%, 88%, 87%, 86%, 85%, 84%, 83%, 82%, 81%, 80% etc.).

[0213] By “conserved sequence region” is meant, a nucleotide sequence of one or more regions in a polynucleotide does not vary significantly between generations or from one biological system or organism to another biological system or organism. The polynucleotide can include both coding and non-coding DNA and RNA.

[0214] By “sense region” is meant a nucleotide sequence of a siNA molecule having complementarity to an antisense region of the siNA molecule. In addition, the sense region of a siNA molecule can comprise a nucleic acid sequence having homology with a target nucleic acid sequence.

[0215] By “antisense region” is meant a nucleotide sequence of a siNA molecule having complementarity to a target nucleic acid sequence. In addition, the antisense region of a siNA molecule can optionally comprise a nucleic acid sequence having complementarity to a sense region of the siNA molecule.

[0216] By “target nucleic acid” is meant any nucleic acid sequence whose expression or activity is to be modulated. The target nucleic acid can be DNA or RNA.

[0217] By “complementarity” is meant that a nucleic acid can form hydrogen bond(s) with another nucleic acid sequence by either traditional Watson-Crick or other non-traditional types. In reference to the nucleic molecules of the present invention, the binding free energy for a nucleic acid molecule with its complementary sequence is sufficient to allow the relevant function of the nucleic acid to proceed, e.g., RNAi activity. Determination of binding free energies for nucleic acid molecules is well known in the art (see, e.g., Turner et al., 1987, CSH Symp. Quant. Biol. LII pp. 123-133; Frier et al., 1986, Proc. Nat. Acad. Sci. USA 83:9373-9377; Turner et al., 1987, J. Am. Chem. Soc. 109:3783-3785). A percent complementarity indicates the percentage of contiguous residues in a nucleic acid molecule that can form hydrogen bonds (e.g., Watson-Crick base pairing) with a second nucleic acid sequence (e.g., 5, 6, 7, 8, 9, or 10 nucleotides out of a total of 10 nucleotides in the first oligonucleotide being based paired to a second nucleic acid sequence having 10 nucleotides represents 50%, 60%, 70%, 80%, 90%, and 100% complementary respectively). “Perfectly complementary” means that all the contiguous residues of a nucleic acid sequence will hydrogen bond with the same number of contiguous residues in a second nucleic acid sequence.

[0218] The siRNA molecules of the invention represent a novel therapeutic approach to treat a variety of pathologic indications or other conditions, such as tumor angiogenesis and cancer, including but not limited to breast cancer, lung cancer (including non-small cell lung carcinoma), prostate cancer, colorectal cancer, brain cancer, esophageal cancer, bladder cancer, pancreatic cancer, cervical cancer, head and neck cancer, skin cancers, nasopharyngeal carcinoma, liposarcoma, epithelial carcinoma, renal cell carcinoma, gallbladder adeno carcinoma, parotid adenocarcinoma, ovarian cancer, melanoma, lymphoma, glioma, endometrial sarcoma, multidrug resistant cancers, diabetic retinopathy, macular degeneration, neovascular glaucoma, myopic degeneration, arthritis, psoriasis, endometriosis, female reproduction, verruca vulgaris, angiofibroma of tuberous sclerosis, pot-wine stains, Sturge Weber syndrome, Kippel-Trenaunay-Weber syndrome, Osler-Weber-Rendu syndrome, renal disease such as Autosomal dominant polycystic kidney disease (ADPKD), and any other diseases or conditions that are related to or will respond to the levels of VEGF, VEGFr1, VEGFr2 and/or VEGFr3 in a cell or tissue, alone or in combination with other therapies. The reduction of VEGF, VEGFr1, VEGFr2 and/or VEGFr3 expression (specifically VEGF, VEGFr1, VEGFr2 and/or VEGFr3 gene RNA levels) and thus reduction in the level of the respective protein relieves, to some extent, the symptoms of the disease or condition.

[0219] In one embodiment of the present invention, each sequence of a siNA molecule of the invention is independently about 18 to about 24 nucleotides in length, in specific embodiments about 18, 19, 20, 21, 22, 23, or 24 nucleotides in length. In another embodiment, the siNA duplexes of the invention independently comprise about 17 to about 23 base pairs (e.g., about 17, 18, 19, 20, 21, 22 or 23). In yet another embodiment, siNA molecules of the invention comprising hairpin or circular structures are about 35 to about 55 (e.g., about 35, 40, 45, 50 or 55) nucleotides in length, or about 38 to about 44 (e.g., 38, 39, 40, 41, 42, 43 or 44) nucleotides in length and comprising about 16 to about 22 (e.g., about 16, 17, 18, 19, 20, 21 or 22) base pairs. Exemplary siNA molecules of the invention are shown in Table II. Exemplary synthetic siNA molecules of the invention are shown in Tables III and IV and/or FIGS. 4-5.

[0220] As used herein “cell” is used in its usual biological sense, and does not refer to an entire multicellular organism, e.g., specifically does not refer to a human. The cell can be present in an organism, e.g., birds, plants and mammals such as humans, cows, sheep, apes, monkeys, swine, dogs, and cats. The cell can be prokaryotic (e.g., bacterial cell) or eukaryotic (e.g., mammalian or plant cell). The cell can be of somatic or germ line origin, totipotent or pluripotent, dividing or non-dividing. The cell can also be derived from or can comprise a gamete or embryo, a stem cell, or a fully differentiated cell.

[0221] The siNA molecules of the invention are added directly, or can be complexed with cationic lipids, packaged within liposomes, or otherwise delivered to target cells or tissues. The nucleic acid or nucleic acid complexes can be locally administered to relevant tissues ex vivo, or in vivo through injection, infusion pump or stent, with or without their incorporation in biopolymers. In particular embodiments, the nucleic acid molecules of the invention comprise sequences shown in Tables II-III and/or FIGS. 4-5. Examples of such nucleic acid molecules consist essentially of sequences defined in these tables and figures. Furthermore, the chemically modified constructs described in Table IV can be applied to any siNA sequence of the invention.

[0222] In another aspect, the invention provides mammalian cells containing one or more siNA molecules of this invention. The one or more siNA molecules can independently be targeted to the same or different sites.

[0223] By “RNA” is meant a molecule comprising at least one ribonucleotide residue. By “ribonucleotide” is meant a nucleotide with a hydroxyl group at the 2′ position of a β-D-ribo-furanose moiety. The terms include double-stranded RNA, single-stranded RNA, isolated RNA such as partially purified RNA, essentially pure RNA, synthetic RNA, recombinantly produced RNA, as well as altered RNA that differs from naturally occurring RNA by the addition, deletion, substitution and/or alteration of one or more nucleotides. Such alterations can include addition of non-nucleotide material, such as to the end(s) of the siNA or internally, for example at one or more nucleotides of the RNA. Nucleotides in the RNA molecules of the instant invention can also comprise non-standard nucleotides, such as non-naturally occurring nucleotides or chemically synthesized nucleotides or deoxynucleotides. These altered RNAs can be referred to as analogs or analogs of naturally-occurring RNA.

[0224] By “subject” is meant an organism, which is a donor or recipient of explanted cells or the cells themselves. “Subject” also refers to an organism to which the nucleic acid molecules of the invention can be administered. A subject can be a mammal or mammalian cells, including a human or human cells.

[0225] The term “phosphorothioate” as used herein refers to an internucleotide linkage having Formula I, wherein Z and/or W comprise a sulfur atom. Hence, the term phosphorothioate refers to both phosphorothioate and phosphorodithioate internucleotide linkages.

[0226] The term “phosphonoacetate” as used herein refers to an internucleotide linkage having Formula I, wherein Z and/or W comprise an acetyl or protected acetyl group.

[0227] The term “thiophosphonoacetate” as used herein refers to an internucleotide linkage having Formula I, wherein Z comprises an acetyl or protected acetyl group and W comprises a sulfur atom or alternately W comprises an acetyl or protected acetyl group and Z comprises a sulfur atom.

[0228] The term “universal base” as used herein refers to nucleotide base analogs that form base pairs with each of the natural DNA/RNA bases with little discrimination between them. Non-limiting examples of universal bases include C-phenyl, C-naphthyl and other aromatic derivatives, inosine, azole carboxamides, and nitroazole derivatives such as 3-nitropyrrole, 4-nitroindole, 5-nitroindole, and 6-nitroindole as known in the art (see for example Loakes, 2001, Nucleic Acids Research, 29, 2437-2447).

[0229] The term “acyclic nucleotide” as used herein refers to any nucleotide having an acyclic ribose sugar, for example where any of the ribose carbons (C1, C2, C3, C4, or C5), are independently or in combination absent from the nucleotide.

[0230] The nucleic acid molecules of the instant invention, individually, or in combination or in conjunction with other drugs, can be used to treat diseases or conditions discussed herein (e.g., cancers and other proliferative conditions). For example, to treat a particular disease or condition, the siNA molecules can be administered to a subject or can be administered to other appropriate cells evident to those skilled in the art, individually or in combination with one or more drugs under conditions suitable for the treatment.

[0231] In a further embodiment, the siNA molecules can be used in combination with other known treatments to treat conditions or diseases discussed above. For example, the described molecules could be used in combination with one or more known therapeutic agents to treat a disease or condition. Non-limiting examples of other therapeutic agents that can be readily combined with a siNA molecule of the invention are enzymatic nucleic acid molecules, allosteric nucleic acid molecules, antisense, decoy, or aptamer nucleic acid molecules, antibodies such as monoclonal antibodies, small molecules, and other organic and/or inorganic compounds including metals, salts and ions.

[0232] In one embodiment, the invention features an expression vector comprising a nucleic acid sequence encoding at least one siNA molecule of the invention, in a manner which allows expression of the siNA molecule. For example, the vector can contain sequence(s) encoding both strands of a siNA molecule comprising a duplex. The vector can also contain sequence(s) encoding a single nucleic acid molecule that is self-complementary and thus forms a siNA molecule. Non-limiting examples of such expression vectors are described in Paul et al., 2002, Nature Biotechnology, 19, 505; Miyagishi and Taira, 2002, Nature Biotechnology, 19, 497; Lee et al., 2002, Nature Biotechnology, 19, 500; and Novina et al., 2002, Nature Medicine, advance online publication doi: 10.1038/nm725.

[0233] In another embodiment, the invention features a mammalian cell, for example, a human cell, including an expression vector of the invention.

[0234] In yet another embodiment, the expression vector of the invention comprises a sequence for a siNA molecule having complementarity to a RNA molecule referred to by a Genbank Accession numbers, for example Genbank Accession Nos. shown in Table I.

[0235] In one embodiment, an expression vector of the invention comprises a nucleic acid sequence encoding two or more siNA molecules, which can be the same or different.

[0236] In another aspect of the invention, siNA molecules that interact with target RNA molecules and down-regulate gene encoding target RNA molecules (for example target RNA molecules referred to by Genbank Accession numbers herein) are expressed from transcription units inserted into DNA or RNA vectors. The recombinant vectors can be DNA plasmids or viral vectors. siNA expressing viral vectors can be constructed based on, but not limited to, adeno-associated virus, retrovirus, adenovirus, or alphavirus. The recombinant vectors capable of expressing the siNA molecules can be delivered as described herein, and persist in target cells. Alternatively, viral vectors can be used that provide for transient expression of siNA molecules. Such vectors can be repeatedly administered as necessary. Once expressed, the siNA molecules bind and down-regulate gene function or expression via RNA interference (RNAi). Delivery of siNA expressing vectors can be systemic, such as by intravenous or intramuscular administration, by administration to target cells ex-planted from a subject followed by reintroduction into the subject, or by any other means that would allow for introduction into the desired target cell.

[0237] By “vectors” is meant any nucleic acid- and/or viral-based technique used to deliver a desired nucleic acid.

[0238] Other features and advantages of the invention will be apparent from the following description of the preferred embodiments thereof, and from the claims.

### BRIEF DESCRIPTION OF THE DRAWINGS

[0239] FIG. 1 shows a non-limiting example of a scheme for the synthesis of siNA molecules. The complementary siNA sequence strands, strand 1 and strand 2, are synthesized in tandem and are connected by a cleavable linkage, such as a nucleotide succinate or abasic succinate, which can be the same or different from the cleavable linker used for solid phase synthesis on a solid support. The synthesis can be either solid phase or solution phase, in the example shown, the synthesis is a solid phase synthesis. The synthesis is performed such that a protecting group, such as a dimethoxytrityl group, remains intact on the terminal nucleotide of the tandem oligonucleotide. Upon cleavage and deprotection of the oligonucleotide, the two siNA strands spontaneously hybridize to form a siNA duplex, which allows the purification of the duplex by utilizing the properties of the terminal protecting group, for example by applying a trityl on purification method wherein only duplexes/oligonucleotides with the terminal protecting group are isolated.

[0240] FIG. 2 shows a MALDI-TOF mass spectrum of a purified siNA duplex synthesized by a method of the invention. The two peaks shown correspond to the predicted mass of the separate siNA sequence strands. This result demonstrates that the siNA duplex generated from tandem synthesis can be purified as a single entity using a simple trityl-on purification methodology.

[0241] FIG. 3 shows a non-limiting proposed mechanistic representation of target RNA degradation involved in RNAi. Double-stranded RNA (dsRNA), which is generated by RNA-dependent RNA polymerase (RdRP) from foreign single-stranded RNA, for example viral, transposon, or other exogenous RNA, activates the DICER enzyme that in turn generates siNA duplexes. Alternately, synthetic or expressed siNA can be introduced directly into a cell by appropriate means. An active siNA complex forms which recognizes a target RNA, resulting in degradation of the target RNA by the RISC endonuclease complex or in the synthesis of additional RNA by RNA-dependent RNA polymerase (RdRP), which can activate DICER and result in additional siNA molecules, thereby amplifying the RNAi response.

[0242] FIG. 4A-F shows non-limiting examples of chemically-modified siNA constructs of the present invention. In the figure, N stands for any nucleotide (adenosine, guanosine, cytosine, uridine, or optionally thymidine, for example thymidine can be substituted in the overhanging regions designated by parenthesis (N N). Various modifications are shown for the sense and antisense strands of the siNA constructs.

[0243] FIG. 4A: The sense strand comprises 21 nucleotides wherein the two terminal 3′-nucleotides are optionally base paired and wherein all nucleotides present are ribonucleotides except for (N N) nucleotides, which can comprise ribonucleotides, deoxynucleotides, universal bases, or other chemical modifications described herein. The antisense strand comprises 21 nucleotides, optionally having a 3′-terminal glyceryl moiety wherein the two terminal 3′-nucleotides are optionally complementary to the target RNA sequence, and wherein all nucleotides present are ribonucleotides except for (N N) nucleotides, which can comprise ribonucleotides, deoxynucleotides, universal bases, or other chemical modifications described herein. A modified internucleotide linkage, such as a phosphorothioate, phosphorodithioate or other modified internucleotide linkage as described herein, shown as “s” connects the (N N) nucleotides in the antisense strand.

[0244] FIG. 4B: The sense strand comprises 21 nucleotides wherein the two terminal 3′-nucleotides are optionally base paired and wherein all pyrimidine nucleotides that may be present are 2′deoxy-2′-fluoro modified nucleotides and all purine nucleotides that may be present are 2′-O-methyl modified nucleotides except for (N N) nucleotides, which can comprise ribonucleotides, deoxynucleotides, universal bases, or other chemical modifications described herein. The antisense strand comprises 21 nucleotides, optionally having a 3′-terminal glyceryl moiety and wherein the two terminal 3′-nucleotides are optionally complementary to the target RNA sequence, and wherein all pyrimidine nucleotides that may be present are 2′-deoxy-2′-fluoro modified nucleotides and all purine nucleotides that may be present are 2′-O-methyl modified nucleotides except for (N N) nucleotides, which can comprise ribonucleotides, deoxynucleotides, universal bases, or other chemical modifications described herein. A modified internucleotide linkage, such as a phosphorothioate, phosphorodithioate or other modified internucleotide linkage as described herein, shown as “s” connects the (N N) nucleotides in the sense and antisense strand.

[0245] FIG. 4C: The sense strand comprises 21 nucleotides having 5′- and 3′-terminal cap moieties wherein the two terminal 3′-nucleotides are optionally base paired and wherein all pyrimidine nucleotides that may be present are 2′-O-methyl or 2′-deoxy-2′-fluoro modified nucleotides except for (N N) nucleotides, which can comprise ribonucleotides, deoxynucleotides, universal bases, or other chemical modifications described herein. The antisense strand comprises 21 nucleotides, optionally having a 3′-terminal glyceryl moiety and wherein the two terminal 3′-nucleotides are optionally complementary to the target RNA sequence, and wherein all pyrimidine nucleotides that may be present are 2′-deoxy-2′-fluoro modified nucleotides except for (N N) nucleotides, which can comprise ribonucleotides, deoxynucleotides, universal bases, or other chemical modifications described herein. A modified internucleotide linkage, such as a phosphorothioate, phosphorodithioate or other modified internucleotide linkage as described herein, shown as “s” connects the (N N) nucleotides in the antisense strand.

[0246] FIG. 4D: The sense strand comprises 21 nucleotides having 5′- and 3′-terminal cap moieties wherein the two terminal 3′-nucleotides are optionally base paired and wherein all pyrimidine nucleotides that may be present are 2′-deoxy-2′-fluoro modified nucleotides except for (N N) nucleotides, which can comprise ribonucleotides, deoxynucleotides, universal bases, or other chemical modifications described herein and wherein and all purine nucleotides that may be present are 2′-deoxy nucleotides. The antisense strand comprises 21 nucleotides, optionally having a 3′-terminal glyceryl moiety and wherein the two terminal 3′-nucleotides are optionally complementary to the target RNA sequence, wherein all pyrimidine nucleotides that may be present are 2′-deoxy-2′-fluoro modified nucleotides and all purine nucleotides that may be present are 2′-O-methyl modified nucleotides except for (N N) nucleotides, which can comprise ribonucleotides, deoxynucleotides, universal bases, or other chemical modifications described herein. A modified internucleotide linkage, such as a phosphorothioate, phosphorodithioate or other modified internucleotide linkage as described herein, shown as “s” connects the (N N) nucleotides in the antisense strand.

[0247] FIG. 4E: The sense strand comprises 21 nucleotides having 5′- and 3′-terminal cap moieties wherein the two terminal 3′-nucleotides are optionally base paired and wherein all pyrimidine nucleotides that may be present are 2′-deoxy-2′-fluoro modified nucleotides except for (N N) nucleotides, which can comprise ribonucleotides, deoxynucleotides, universal bases, or other chemical modifications described herein. The antisense strand comprises 21 nucleotides, optionally having a 3′-terminal glyceryl moiety and wherein the two terminal 3′-nucleotides are optionally complementary to the target RNA sequence, and wherein all pyrimidine nucleotides that may be present are 2′-deoxy-2′-fluoro modified nucleotides and all purine nucleotides that may be present are 2′-O-methyl modified nucleotides except for (N N) nucleotides, which can comprise ribonucleotides, deoxynucleotides, universal bases, or other chemical modifications described herein. A modified internucleotide linkage, such as a phosphorothioate, phosphorodithioate or other modified internucleotide linkage as described herein, shown as “s” connects the (N N) nucleotides in the antisense strand.

[0248] FIG. 4F: The sense strand comprises 21 nucleotides having 5′- and 3′-terminal cap moieties wherein the two terminal 3′-nucleotides are optionally base paired and wherein all pyrimidine nucleotides that may be present are 2′-deoxy-2′-fluoro modified nucleotides except for (N N) nucleotides, which can comprise ribonucleotides, deoxynucleotides, universal bases, or other chemical modifications described herein and wherein and all purine nucleotides that may be present are 2′-deoxy nucleotides. The antisense strand comprises 21 nucleotides, optionally having a 3′-terminal glyceryl moiety and wherein the two terminal 3′-nucleotides are optionally complementary to the target RNA sequence, and having one 3′-terminal phosphorothioate internucleotide linkage and wherein all pyrimidine nucleotides that may be present are 2′-deoxy-2′-fluoro modified nucleotides and all purine nucleotides that may be present are 2′-deoxy nucleotides except for (N N) nucleotides, which can comprise ribonucleotides, deoxynucleotides, universal bases, or other chemical modifications described herein. A modified internucleotide linkage, such as a phosphorothioate, phosphorodithioate or other modified internucleotide linkage as described herein, shown as “s” connects the (N N) nucleotides in the antisense strand. The antisense strand of constructs A-F comprise sequence complementary to any target nucleic acid sequence of the invention. Furthermore, when a glyceryl moiety (L) is present at the 3′-end of the antisense strand for any construct shown in FIG. 4A-F, the modified internucleotide linkage is optional.

[0249] FIG. 5A-F shows non-limiting examples of specific chemically-modified siNA sequences of the invention. A-F applies the chemical modifications described in FIG. 4A-F to a VEGFr2 siNA sequence. Such chemical modifications can be applied to any sequence herein, such as any VEGF, VEGFr1, VEGFr2, or VEGFr3 sequence.

[0250] FIG. 6 shows non-limiting examples of different siNA constructs of the invention. The examples shown (constructs 1, 2, and 3) have 19 representative base pairs; however, different embodiments of the invention include any number of base pairs described herein. Bracketed regions represent nucleotide overhangs, for example comprising about 1, 2, 3, or 4 nucleotides in length, preferably about 2 nucleotides. Constructs 1 and 2 can be used independently for RNAi activity. Construct 2 can comprise a polynucleotide or non-nucleotide linker, which can optionally be designed as a biodegradable linker. In one embodiment, the loop structure shown in construct 2 can comprise a biodegradable linker that results in the formation of construct 1 in vivo and/or in vitro. In another example, construct 3 can be used to generate construct 2 under the same principle wherein a linker is used to generate the active siNA construct 2 in vivo and/or in vitro, which can optionally utilize another biodegradable linker to generate the active siNA construct 1 in vivo and/or in vitro. As such, the stability and/or activity of the siNA constructs can be modulated based on the design of the siNA construct for use in vivo or in vitro and/or in vitro.

[0251] FIG. 7A-C is a diagrammatic representation of a scheme utilized in generating an expression cassette to generate siNA hairpin constructs.

[0252] FIG. 7A: A DNA oligomer is synthesized with a 5′-restriction site (R1) sequence followed by a region having sequence identical (sense region of siNA) to a predetermined VEGF and/or VEGFr target sequence, wherein the sense region comprises, for example, about 19, 20, 21, or 22 nucleotides (N) in length, which is followed by a loop sequence of defined sequence (X), comprising, for example, about 3 to about 10 nucleotides.

[0253] FIG. 7B: The synthetic construct is then extended by DNA polymerase to generate a hairpin structure having self-complementary sequence that will result in a siNA transcript having specificity for a VEGF and/or VEGFr target sequence and having self-complementary sense and antisense regions.

[0254] FIG. 7C: The construct is heated (for example to about 95° C.) to linearize the sequence, thus allowing extension of a complementary second DNA strand using a primer to the 3′-restriction sequence of the first strand. The double-stranded DNA is then inserted into an appropriate vector for expression in cells. The construct can be designed such that a 3′-terminal nucleotide overhang results from the transcription, for example by engineering restriction sites and/or utilizing a poly-U termination region as described in Paul et al., 2002, Nature Biotechnology, 29, 505-508.

[0255] FIG. 8A-C is a diagrammatic representation of a scheme utilized in generating an expression cassette to generate double-stranded siNA constructs.

[0256] FIG. 8A: A DNA oligomer is synthesized with a 5′-restriction (R1) site sequence followed by a region having sequence identical (sense region of siNA) to a predetermined VEGF and/or VEGFr target sequence, wherein the sense region comprises, for example, about 19, 20, 21, or 22 nucleotides (N) in length, and which is followed by a 3′-restriction site (R2) which is adjacent to a loop sequence of defined sequence (X).

[0257] FIG. 8B: The synthetic construct is then extended by DNA polymerase to generate a hairpin structure having self-complementary sequence.

[0258] FIG. 8C: The construct is processed by restriction enzymes specific to R1 and R2 to generate a double-stranded DNA which is then inserted into an appropriate vector for expression in cells. The transcription cassette is designed such that a U6 promoter region flanks each side of the dsDNA which generates the separate sense and antisense strands of the siNA. Poly T termination sequences can be added to the constructs to generate U overhangs in the resulting transcript.

[0259] FIG. 9A-E is a diagrammatic representation of a method used to determine target sites for siNA mediated RNAi within a particular target nucleic acid sequence, such as messenger RNA.

[0260] FIG. 9A: A pool of siNA oligonucleotides are synthesized wherein the antisense region of the siNA constructs has complementarity to target sites across the target nucleic acid sequence, and wherein the sense region comprises sequence complementary to the antisense region of the siNA.

[0261] FIGS. 9B&C: (FIG. 9B) The sequences are pooled and are inserted into vectors such that (FIG. 9C) transfection of a vector into cells results in the expression of the siNA.

[0262] FIG. 9D: Cells are sorted based on phenotypic change that is associated with modulation of the target nucleic acid sequence.

[0263] FIG. 9E: The siNA is isolated from the sorted cells and is sequenced to identify efficacious target sites within the target nucleic acid sequence.

[0264] FIG. 10 shows non-limiting examples of different stabilization chemistries (1-10) that can be used, for example, to stabilize the 3′-end of siNA sequences of the invention, including (1) [3-3′]-inverted deoxyribose; (2) deoxyribonucleotide; (3) [5′-3′]-3′-deoxyribonucleotide; (4) [5′-3′]-ribonucleotide; (5) [5′-3′]-3′-O-methyl ribonucleotide; (6) 3′-glyceryl; (7) [3′-5′]-3′-deoxyribonucleotide; (8) [3′-3′]-deoxyribonucleotide; (9) [5′-2′]-deoxyribonucleotide; and (10) [5-3′]-dideoxyribonucleotide. In addition to modified and unmodified backbone chemistries indicated in the figure, these chemistries can be combined with different backbone modifications as described herein, for example, backbone modifications having Formula I. In addition, the 2′-deoxy nucleotide shown 5′ to the terminal modifications shown can be another modified or unmodified nucleotide or non-nucleotide described herein, for example modifications having any of Formulae I-VII or any combination thereof.

[0265] FIG. 11 shows a non-limiting example of a strategy used to identify chemically modified siNA constructs of the invention that are nuclease resistance while preserving the ability to mediate RNAi activity. Chemical modifications are introduced into the siNA construct based on educated design parameters (e.g. introducing 2′-mofications, base modifications, backbone modifications, terminal cap modifications etc). The modified construct in tested in an appropriate system (e.g. human serum for nuclease resistance, shown, or an animal model for PK/delivery parameters). In parallel, the siNA construct is tested for RNAi activity, for example in a cell culture system such as a luciferase reporter assay). Lead siNA constructs are then identified which possess a particular characteristic while maintaining RNAi activity, and can be further modified and assayed once again. This same approach can be used to identify siNA-conjugate molecules with improved pharmacokinetic profiles, delivery, and RNAi activity.

[0266] FIG. 12 shows a non-limiting example of siNA mediated inhibition of VEGF-induced angiogenesis using the rat corneal model of angiogenesis. siNA targeting site 2340 of VEGFr1 RNA (shown as RPI No. 29695/29699 sense strand/antisense strand) was compared to an inverted control siNA (shown as RPI No. 29983/29984 sense strand/antisense strand) at three different concentrations (1 ug, 3 ug, and 10 ug) and compared to a VEGF control in which no siNA was administered. As shown in the Figure, siNA constructs targeting VEGFr1 RNA can provide significant inhibition of angiogenesis in the rat corneal model.

[0267] FIG. 13 shows a non-limiting example of reduction of VEGFr1 mRNA in A375 cells mediated by chemically-modified siNAs that target VEGFr1 mRNA. A549 cells were transfected with 0.25 ug/well of lipid complexed with 25 nM siNA. A screen of siNA constructs (Stabilization “Stab” chemistries are shown in Table IV, constructs are referred to by RPI number, see Table III) comprising Stab 4/5 chemistry (RPI 31190/31193), Stab 1/2 chemistry (RPI 31183/31186 and RPI 31184/31187), and unmodified RNA (RPI 30075/30076) were compared to untreated cells, matched chemistry inverted control siNA constructs, (RPI 31208/31211, RPI 31201/31204, RPI 31202/31205, and RPI 30077/30078) scrambled siNA control constructs (Scram1 and Scram2), and cells transfected with lipid alone (transfection control). All of the siNA constructs show significant reduction of VEGFr1 RNA expression.

[0268] FIG. 14 shows non-limiting examples of phosphorylated siNA molecules of the invention, including linear and duplex constructs and asymmetric derivatives thereof.

[0269] FIG. 15 shows non-limiting examples of chemically modified terminal phosphate groups of the invention.

[0270] FIG. 16 shows a non-limiting example of inhibition of VEGF induced neovascularization in the rat corneal model. VEGFr1 site 349 active siNA having “Stab 9/10” chemistry (Compound No. 31270/31273) was tested for inhibition of VEGF-induced angiogenesis at three different concentrations (2.0 ug, 1.0 ug, and 0.1 ug dose response) as compared to a matched chemistry inverted control siNA construct (Compound No. 31276/31279) at each concentration and a VEGF control in which no siNA was administered. As shown in the figure, the active siNA construct having “Stab 9/10” chemistry (Compound No. 31270/31273) is highly effective in inhibiting VEGF-induced angiogenesis in the rat corneal model compared to the matched chemistry inverted control siNA at concentrations from 0.1 ug to 2.0 ug.

[0271] FIG. 17 shows a non-limiting example of inhibition of VEGF induced neovascularization in a mouse model of coroidal neovascularization via intraocular administration of siNA. VEGFr1 site 349 active siNA having “Stab 9/10” chemistry (Compound No. 31270/31273) was tested for inhibition of neovascularization at two different concentrations (1.5 ug, and 0.5 ug) as compared to a matched chemistry inverted control siNA construct (Compound No. 31276/31279) and phosphate buffered saline (PBS). siNA constructs were administered intraocularly on days 1 and 7 following laser induced injury to the choroid, and choroidal neovascularization assessed on day 14. As shown in the figure, the active siNA construct having “Stab 9/10” chemistry (Compound No. 31270/31273) is highly effective in inhibiting neovascularization via intraocular administration in this model.

[0272] FIG. 18 shows a non-limiting example of inhibition of VEGF induced neovascularization in a mouse model of coroidal neovascularization via periocular administration of siNA. VEGFr1 site 349 active siNA having “Stab 9/10” chemistry (Compound No. 31270/31273) was tested for inhibition of neovascularization at two different concentrations (1.5 ug with a saline control, and 0.5 ug with an inverted siNA control, Compound No. 31276/31279). Eight mice were used in each arm of the study with one eye receiving the active siNA and the other eye receiving the saline or inverted control. siNA constructs and controls were adminitered daily up to 14 days, and neovascularization was assessed at day 17 following laser induced injury to the choroid. As shown in the figure, the active siNA construct having “Stab 9/10” chemistry (Compound No. 31270/31273) is highly effective in inhibiting neovascularization via periocular administration in this model.

[0273] FIG. 19 shows another non-limiting example of inhibition of VEGF induced neovascularization in a mouse model of coroidal neovascularization via periocular administration of siNA. VEGFr1 site 349 active siNA having “Stab 9/10” chemistry (Compound No. 31270/31273) was tested for inhibition of neovascularization at two different concentrations (1.5 ug with an inverted siNA control, Compound No. 31276/31279 and 0.5 ug with a saline control). Nine mice were used in the active versus inverted arm of the study with one eye receiving the active siNA and the other eye receiving the inverted control. Eight mice were used in the active versus saline arm of the study with one eye receiving the active siNA and the other eye receiving the saline control. siNA constructs and controls were administered daily up to 14 days, and neovascularization was assessed at day 17 following laser induced injury to the choroid. As shown in the figure, the active siNA construct having “Stab 9/10” chemistry (Compound No. 31270/31273) is highly effective in inhibiting neovascularization via periocular administration in this model.

[0274] FIG. 20 shows a non-limiting example of the reduction of primary tumor volume in a mouse 4T1-luciferase mammary carcinoma syngeneic tumor model using active Stab 9/10 siNA targeting site 349 of VEGFr-1 RNA (Compound # 31270/31273) compared to a matched chemistry inactive inverted control siNA (Compound # 31276/31279) and saline. As shown in the figure, the active siNA construct is effective in reducing tumor volume in this model.

[0275] FIG. 21 shows a non-limiting example of the reduction of soluble VEGFr1 serum levels in a mouse 4T1-luciferase mammary carcinoma syngeneic tumor model using active Stab 9/10 siNA targeting site 349 of VEGFr-1 RNA (Compound # 31270/31273) compared to a matched chemistry inactive inverted control siNA (Compound # 31276/31279). As shown in the figure, the active siNA construct is effective in reducing soluble VEGFr1 serum levels in this model.

[0276] FIG. 22 shows non-limiting examples of reduction of VEGFr1 (Flt-1) mRNA levels in HAEC cells (15,000 cells/well) 24 hours after treatment with siNA molecules targeting sequences having VEGFr1 (Flt-1) and VEGFr2 (KDR) homology. HAEC cells were transfected with 1.5 ug/well of lipid complexed with 25 nM siNA. Activity of the siNA molecules is shown compared to matched chemistry inverted siNA controls, untreated cells, and cells treated with lipid only (transfection control). siNA molecules and controls are referred to by compound numbers (sense/antisense), see Table III for sequences. FIG. 22A shows data for Stab 9/10 siNA constructs. FIG. 22B shows data for Stab 7/8 siNA constructs. The FIG. 22B study includes a construct that targets only VEGFr1 (32748/32755) and a matched chemistry inverted control thereof (32772/32779) as additional controls. As shown in the figures, the siNA constructs that target both VEGFr1 and VEGFr2 sequences demonstrate potent efficacy in inhibiting VEGFr1 expression in cell cuture experiments.

[0277] FIG. 23 shows non-limiting examples of reduction of VEGFr2 (KDR) mRNA levels in HAEC cells (15,000 cells/well) 24 hours after treatment with siNA molecules targeting sequences having VEGFr1 and VEGFr2 homology. HAEC cells were transfected with 1.5 ug/well of lipid complexed with 25 nM siNA. Activity of the siNA molecules is shown compared to matched chemistry inverted siNA controls, untreated cells, and cells treated with lipid only (transfection control). siNA molecules and controls are referred to by compound numbers (sense/antisense), see Table III for sequences. FIG. 23A shows data for Stab 9/10 siNA constructs. FIG. 23B shows data for Stab 7/8 siNA constructs. The FIG. 23B study includes a construct that targets only VEGFr1 (32748/32755) and a matched chemistry inverted control thereof (32772/32779) as additional controls. As shown in the figures, the siNA constructs that target both VEGFr1 and VEGFr2 sequences demonstrate potent efficacy in inhibiting VEGFr2 expression in cell cuture experiments.

[0278] FIG. 24 shows a non-limiting example of inhibition of VEGF induced ocular angiogenesis using siNA constructs that target homologous sequences shared by VEGFr1 and VEGFr2 via subconjuctival administration of the siNA after VEGF disk implantation. siNA constructs were administered intraocularly on days 1 and 7 following laser induced injury to the choroid, and choroidal neovascularization assessed on day 14.

### DETAILED DESCRIPTION OF THE INVENTION

[0279] Mechanism of Action of Nucleic Acid Molecules of the Invention

[0280] The discussion that follows discusses the proposed mechanism of RNA interference mediated by short interfering RNA as is presently known, and is not meant to be limiting and is not an admission of prior art. Applicant demonstrates herein that chemically-modified short interfering nucleic acids possess similar or improved capacity to mediate RNAi as do siRNA molecules and are expected to possess improved stability and activity in vivo; therefore, this discussion is not meant to be limiting only to siRNA and can be applied to siNA as a whole. By “improved capacity to mediate RNAi” or “improved RNAi activity” is meant to include RNAi activity measured in vitro and/or in vivo where the RNAi activity is a reflection of both the ability of the siNA to mediate RNAi and the stability of the siNAs of the invention. In this invention, the product of these activities can be increased in vitro and/or in vivo compared to an all RNA siRNA or a siNA containing a plurality of ribonucleotides. In some cases, the activity or stability of the siNA molecule can be decreased (i.e., less than ten-fold), but the overall activity of the siNA molecule is enhanced in vitro and/or in vivo.

[0281] RNA interference refers to the process of sequence specific post-transcriptional gene silencing in animals mediated by short interfering RNAs (siRNAs) (Fire et al., 1998, Nature, 391, 806). The corresponding process in plants is commonly referred to as post-transcriptional gene silencing or RNA silencing and is also referred to as quelling in fungi. The process of post-transcriptional gene silencing is thought to be an evolutionarily-conserved cellular defense mechanism used to prevent the expression of foreign genes which is commonly shared by diverse flora and phyla (Fire et al., 1999, Trends Genet., 15, 358). Such protection from foreign gene expression may have evolved in response to the production of double-stranded RNAs (dsRNAs) derived from viral infection or the random integration of transposon elements into a host genome via a cellular response that specifically destroys homologous single-stranded RNA or viral genomic RNA. The presence of dsRNA in cells triggers the RNAi response though a mechanism that has yet to be fully characterized. This mechanism appears to be different from the interferon response that results from dsRNA-mediated activation of protein kinase PKR and 2′,5′-oligoadenylate synthetase resulting in non-specific cleavage of mRNA by ribonuclease L.

[0282] The presence of long dsRNAs in cells stimulates the activity of a ribonuclease III enzyme referred to as Dicer. Dicer is involved in the processing of the dsRNA into short pieces of dsRNA known as short interfering RNAs (siRNAs) (Berstein et al., 2001, Nature, 409, 363). Short interfering RNAs derived from Dicer activity are typically about 21 to about 23 nucleotides in length and comprise about 19 base pair duplexes. Dicer has also been implicated in the excision of 21- and 22-nucleotide small temporal RNAs (stRNAs) from precursor RNA of conserved structure that are implicated in translational control (Hutvagner et al., 2001, Science, 293, 834). The RNAi response also features an endonuclease complex containing a siRNA, commonly referred to as an RNA-induced silencing complex (RISC), which mediates cleavage of single-stranded RNA having sequence homologous to the siRNA. Cleavage of the target RNA takes place in the middle of the region complementary to the guide sequence of the siRNA duplex (Elbashir et al., 2001, Genes Dev., 15, 188). In addition, RNA interference can also involve small RNA (e.g., micro-RNA or mRNA) mediated gene silencing, presumably though cellular mechanisms that regulate chromatin structure and thereby prevent transcription of target gene sequences (see for example Allshire, 2002, Science, 297, 1818-1819; Volpe et al., 2002, Science, 297, 1833-1837; Jenuwein, 2002, Science, 297, 2215-2218; and Hall et al., 2002, Science, 297, 2232-2237). As such, siNA molecules of the invention can be used to mediate gene silencing via interaction with RNA transcripts or alternately by interaction with particular gene sequences, wherein such interaction results in gene silencing either at the transcriptional level or post-transcriptional level.

[0283] RNAi has been studied in a variety of systems. Fire et al., 1998, Nature, 391, 806, were the first to observe RNAi in C. elegans. Wianny and Goetz, 1999, Nature Cell Biol., 2, 70, describe RNAi mediated by dsRNA in mouse embryos. Hammond et al., 2000, Nature, 404, 293, describe RNAi in Drosophila cells transfected with dsRNA. Elbashir et al., 2001, Nature, 411, 494, describe RNAi induced by introduction of duplexes of synthetic 21-nucleotide RNAs in cultured mammalian cells including human embryonic kidney and HeLa cells. Recent work in Drosophila embryonic lysates has revealed certain requirements for siRNA length, structure, chemical composition, and sequence that are essential to mediate efficient RNAi activity. These studies have shown that 21 nucleotide siRNA duplexes are most active when containing two 2-nucleotide 3′-terminal nucleotide overhangs. Furthermore, substitution of one or both siRNA strands with 2′-deoxy or 2′-O-methyl nucleotides abolishes RNAi activity, whereas substitution of 3′-terminal siRNA nucleotides with deoxy nucleotides was shown to be tolerated. Mismatch sequences in the center of the siRNA duplex were also shown to abolish RNAi activity. In addition, these studies also indicate that the position of the cleavage site in the target RNA is defined by the 5′-end of the siRNA guide sequence rather than the 3′-end (Elbashir et al., 2001, EMBO J, 20, 6877). Other studies have indicated that a 5′-phosphate on the target-complementary strand of a siRNA duplex is required for siRNA activity and that ATP is utilized to maintain the 5′-phosphate moiety on the siRNA (Nykanen et al., 2001, Cell, 107, 309); however, siRNA molecules lacking a 5′-phosphate are active when introduced exogenously, suggesting that 5′-phosphorylation of siRNA constructs may occur in vivo.

[0284] Synthesis of Nucleic Acid Molecules

[0285] Synthesis of nucleic acids greater than 100 nucleotides in length is difficult using automated methods, and the therapeutic cost of such molecules is prohibitive. In this invention, small nucleic acid motifs (“small” refers to nucleic acid motifs no more than 100 nucleotides in length, preferably no more than 80 nucleotides in length, and most preferably no more than 50 nucleotides in length; e.g., individual siNA oligonucleotide sequences or siNA sequences synthesized in tandem) are preferably used for exogenous delivery. The simple structure of these molecules increases the ability of the nucleic acid to invade targeted regions of protein and/or RNA structure. Exemplary molecules of the instant invention are chemically synthesized, and others can similarly be synthesized.

[0286] Oligonucleotides (e.g., certain modified oligonucleotides or portions of oligonucleotides lacking ribonucleotides) are synthesized using protocols known in the art, for example as described in Caruthers et al., 1992, Methods in Enzymology 211, 3-19, Thompson et al., International PCT Publication No. WO 99/54459, Wincott et al., 1995, Nucleic Acids Res. 23, 2677-2684, Wincott et al., 1997, Methods Mol. Bio., 74, 59, Brennan et al., 1998, Biotechnol Bioeng., 61, 33-45, and Brennan, U.S. Pat. No. 6,001,311. All of these references are incorporated herein by reference. The synthesis of oligonucleotides makes use of common nucleic acid protecting and coupling groups, such as dimethoxytrityl at the 5′-end, and phosphoramidites at the 3′-end. In a non-limiting example, small scale syntheses are conducted on a 394 Applied Biosystems, Inc. synthesizer using a 0.2 μmol scale protocol with a 2.5 min coupling step for 2′-O-methylated nucleotides and a 45 second coupling step for 2′-deoxy nucleotides or 2′-deoxy-2′-fluoro nucleotides. Table V outlines the amounts and the contact times of the reagents used in the synthesis cycle. Alternatively, syntheses at the 0.2 μmol scale can be performed on a 96-well plate synthesizer, such as the instrument produced by Protogene (Palo Alto, Calif.) with minimal modification to the cycle. A 33-fold excess (60 μL of 0.11 M=6.6 μmol) of 2′-O-methyl phosphoramidite and a 105-fold excess of S-ethyl tetrazole (60 μL of 0.25 M=15 μmol) can be used in each coupling cycle of 2′-O-methyl residues relative to polymer-bound 5′-hydroxyl. A 22-fold excess (40 μL of 0.11 M=4.4 μmol) of deoxy phosphoramidite and a 70-fold excess of S-ethyl tetrazole (40 μL of 0.25 M=10 μmol) can be used in each coupling cycle of deoxy residues relative to polymer-bound 5′-hydroxyl. Average coupling yields on the 394 Applied Biosystems, Inc. synthesizer, determined by colorimetric quantitation of the trityl fractions, are typically 97.5-99%. Other oligonucleotide synthesis reagents for the 394 Applied Biosystems, Inc. synthesizer include the following: detritylation solution is 3% TCA in methylene chloride (ABI); capping is performed with 16% N-methyl imidazole in THF (ABI) and 10% acetic anhydride/10% 2,6-lutidine in THF (ABI); and oxidation solution is 16.9 mM I₂, 49 mM pyridine, 9% water in THF (PERSEPTIVE™). Burdick & Jackson Synthesis Grade acetonitrile is used directly from the reagent bottle. S-Ethyltetrazole solution (0.25 M in acetonitrile) is made up from the solid obtained from American International Chemical, Inc. Alternately, for the introduction of phosphorothioate linkages, Beaucage reagent (3H-1,2-Benzodithiol-3-one 1,1-dioxide, 0.05 M in acetonitrile) is used.

[0287] Deprotection of the DNA-based oligonucleotides is performed as follows: the polymer-bound trityl-on oligoribonucleotide is transferred to a 4 mL glass screw top vial and suspended in a solution of 40% aqueous methylamine (1 mL) at 65° C. for 10 minutes. After cooling to −20° C., the supernatant is removed from the polymer support. The support is washed three times with 1.0 mL of EtOH:MeCN:H₂O/3:1:1, vortexed and the supernatant is then added to the first supernatant. The combined supernatants, containing the oligoribonucleotide, are dried to a white powder.

[0288] The method of synthesis used for RNA including certain siNA molecules of the invention follows the procedure as described in Usman et al., 1987, J. Am. Chem. Soc., 109, 7845; Scaringe et al., 1990, Nucleic Acids Res., 18, 5433; and Wincott et al., 1995, Nucleic Acids Res. 23, 2677-2684 Wincott et al., 1997, Methods Mol. Bio., 74, 59, and makes use of common nucleic acid protecting and coupling groups, such as dimethoxytrityl at the 5′-end, and phosphoramidites at the 3′-end. In a non-limiting example, small scale syntheses are conducted on a 394 Applied Biosystems, Inc. synthesizer using a 0.2 μmol scale protocol with a 7.5 min coupling step for alkylsilyl protected nucleotides and a 2.5 min coupling step for 2′-O-methylated nucleotides. Table V outlines the amounts and the contact times of the reagents used in the synthesis cycle. Alternatively, syntheses at the 0.2 μmol scale can be done on a 96-well plate synthesizer, such as the instrument produced by Protogene (Palo Alto, Calif.) with minimal modification to the cycle. A 33-fold excess (60 μL of 0.11 M=6.6 μmol) of 2′-O-methyl phosphoramidite and a 75-fold excess of S-ethyl tetrazole (60 μL of 0.25 M=15 μmol) can be used in each coupling cycle of 2′-O-methyl residues relative to polymer-bound 5′-hydroxyl. A 66-fold excess (120 μL of 0.11 M=13.2 μmol) of alkylsilyl (ribo) protected phosphoramidite and a 150-fold excess of S-ethyl tetrazole (120 μL of 0.25 M=30 μmol) can be used in each coupling cycle of ribo residues relative to polymer-bound 5′-hydroxyl. Average coupling yields on the 394 Applied Biosystems, Inc. synthesizer, determined by colorimetric quantitation of the trityl fractions, are typically 97.5-99%. Other oligonucleotide synthesis reagents for the 394 Applied Biosystems, Inc. synthesizer include the following: detritylation solution is 3% TCA in methylene chloride (ABI); capping is performed with 16% N-methyl imidazole in THF (ABI) and 10% acetic anhydride/10% 2,6-lutidine in THF (ABI); oxidation solution is 16.9 mM 12, 49 mM pyridine, 9% water in THF (PERSEPTIVE™). Burdick & Jackson Synthesis Grade acetonitrile is used directly from the reagent bottle. S-Ethyltetrazole solution (0.25 M in acetonitrile) is made up from the solid obtained from American International Chemical, Inc. Alternately, for the introduction of phosphorothioate linkages, Beaucage reagent (3H-1,2-Benzodithiol-3-one 1,1-dioxide 0.05 M in acetonitrile) is used.

[0289] Deprotection of the RNA is performed using either a two-pot or one-pot protocol. For the two-pot protocol, the polymer-bound trityl-on oligoribonucleotide is transferred to a 4 mL glass screw top vial and suspended in a solution of 40% aq. methylamine (1 mL) at 65° C. for 10 min. After cooling to −20° C., the supernatant is removed from the polymer support. The support is washed three times with 1.0 mL of EtOH:MeCN:H₂O/3:1:1, vortexed and the supernatant is then added to the first supernatant. The combined supernatants, containing the oligoribonucleotide, are dried to a white powder. The base deprotected oligoribonucleotide is resuspended in anhydrous TEA/HF/NMP solution (300 μL of a solution of 1.5 mL N-methylpyrrolidinone, 750 μL TEA and 1 mL TEA·3HF to provide a 1.4 M HF concentration) and heated to 65° C. After 1.5 h, the oligomer is quenched with 1.5 M NH₄HCO₃.

[0290] Alternatively, for the one-pot protocol, the polymer-bound trityl-on oligoribonucleotide is transferred to a 4 mL glass screw top vial and suspended in a solution of 33% ethanolic methylamine/DMSO: 1/1 (0.8 mL) at 65° C. for 15 minutes. The vial is brought to room temperature TEA·3HF (0.1 mL) is added and the vial is heated at 65° C. for 15 minutes. The sample is cooled at −20° C. and then quenched with 1.5 M NH₄HCO₃.

[0291] For purification of the trityl-on oligomers, the quenched NH₄HCO₃ solution is loaded onto a C-18 containing cartridge that had been prewashed with acetonitrile followed by 50 mM TEAA. After washing the loaded cartridge with water, the RNA is detritylated with 0.5% TFA for 13 minutes. The cartridge is then washed again with water, salt exchanged with 1 M NaCl and washed with water again. The oligonucleotide is then eluted with 30% acetonitrile.

[0292] The average stepwise coupling yields are typically >98% (Wincott et al., 1995 Nucleic Acids Res. 23, 2677-2684). Those of ordinary skill in the art will recognize that the scale of synthesis can be adapted to be larger or smaller than the example described above including but not limited to 96-well format.

[0293] Alternatively, the nucleic acid molecules of the present invention can be synthesized separately and joined together post-synthetically, for example, by ligation (Moore et al., 1992, Science 256, 9923; Draper et al., International PCT publication No. WO 93/23569; Shabarova et al., 1991, Nucleic Acids Research 19, 4247; Bellon et al., 1997, Nucleosides & Nucleotides, 16, 951; Bellon et al., 1997, Bioconjugate Chem. 8, 204), or by hybridization following synthesis and/or deprotection.

[0294] The siNA molecules of the invention can also be synthesized via a tandem synthesis methodology as described in Example 1 herein, wherein both siNA strands are synthesized as a single contiguous oligonucleotide fragment or strand separated by a cleavable linker which is subsequently cleaved to provide separate siNA fragments or strands that hybridize and permit purification of the siNA duplex. The linker can be a polynucleotide linker or a non-nucleotide linker. The tandem synthesis of siNA as described herein can be readily adapted to both multiwell/multiplate synthesis platforms such as 96 well or similarly larger multi-well platforms. The tandem synthesis of siNA as described herein can also be readily adapted to large scale synthesis platforms employing batch reactors, synthesis columns and the like.

[0295] A siNA molecule can also be assembled from two distinct nucleic acid strands or fragments wherein one fragment includes the sense region and the second fragment includes the antisense region of the RNA molecule.

[0296] The nucleic acid molecules of the present invention can be modified extensively to enhance stability by modification with nuclease resistant groups, for example, 2′-amino, 2′-C-allyl, 2′-fluoro, 2′-O-methyl, 2′-H (for a review see Usman and Cedergren, 1992, TIBS 17, 34; Usman et al., 1994, Nucleic Acids Symp. Ser. 31, 163). siNA constructs can be purified by gel electrophoresis using general methods or can be purified by high pressure liquid chromatography (HPLC; see Wincott et al., supra, the totality of which is hereby incorporated herein by reference) and re-suspended in water.

[0297] In another aspect of the invention, siNA molecules of the invention are expressed from transcription units inserted into DNA or RNA vectors. The recombinant vectors can be DNA plasmids or viral vectors. siNA expressing viral vectors can be constructed based on, but not limited to, adeno-associated virus, retrovirus, adenovirus, or alphavirus. The recombinant vectors capable of expressing the siNA molecules can be delivered as described herein, and persist in target cells. Alternatively, viral vectors can be used that provide for transient expression of siNA molecules.

[0298] Optimizing Activity of the Nucleic Acid Molecule of the Invention.

[0299] Chemically synthesizing nucleic acid molecules with modifications (base, sugar and/or phosphate) can prevent their degradation by serum ribonucleases, which can increase their potency (see e.g., Eckstein et al., International Publication No. WO 92/07065; Perrault et al., 1990 Nature 344, 565; Pieken et al., 1991, Science 253, 314; Usman and Cedergren, 1992, Trends in Biochem. Sci. 17, 334; Usman et al., International Publication No. WO 93/15187; and Rossi et al., International Publication No. WO 91/03162; Sproat, U.S. Pat. No. 5,334,711; Gold et al., U.S. Pat. No. 6,300,074; and Burgin et al., supra; all of which are incorporated by reference herein). All of the above references describe various chemical modifications that can be made to the base, phosphate and/or sugar moieties of the nucleic acid molecules described herein. Modifications that enhance their efficacy in cells, and removal of bases from nucleic acid molecules to shorten oligonucleotide synthesis times and reduce chemical requirements are desired.

[0300] There are several examples in the art describing sugar, base and phosphate modifications that can be introduced into nucleic acid molecules with significant enhancement in their nuclease stability and efficacy. For example, oligonucleotides are modified to enhance stability and/or enhance biological activity by modification with nuclease resistant groups, for example, 2′-amino, 2′-C-allyl, 2′-fluoro, 2′-O-methyl, 2′-O-allyl, 2′-H, nucleotide base modifications (for a review see Usman and Cedergren, 1992, TIBS. 17, 34; Usman et al., 1994, Nucleic Acids Symp. Ser. 31, 163; Burgin et al., 1996, Biochemistry, 35, 14090). Sugar modification of nucleic acid molecules have been extensively described in the art (see Eckstein et al., International Publication PCT No. WO 92/07065; Perrault et al. Nature, 1990, 344, 565-568; Pieken et al. Science, 1991, 253, 314-317; Usman and Cedergren, Trends in Biochem. Sci., 1992, 17, 334-339; Usman et al. International Publication PCT No. WO 93/15187; Sproat, U.S. Pat. No. 5,334,711 and Beigelman et al., 1995, J. Biol. Chem., 270, 25702; Beigelman et al., International PCT publication No. WO 97/26270; Beigelman et al., U.S. Pat. No. 5,716,824; Usman et al., U.S. Pat. No. 5,627,053; Woolf et al., International PCT Publication No. WO 98/13526; Thompson et al., U.S. Ser. No. 60/082,404 which was filed on Apr. 20, 1998; Karpeisky et al., 1998, Tetrahedron Lett., 39, 1131; Earnshaw and Gait, 1998, Biopolymers (Nucleic Acid Sciences), 48, 39-55; Verma and Eckstein, 1998, Annu. Rev. Biochem., 67, 99-134; and Burlina et al., 1997, Bioorg. Med. Chem., 5, 1999-2010; all of the references are hereby incorporated in their totality by reference herein). Such publications describe general methods and strategies to determine the location of incorporation of sugar, base and/or phosphate modifications and the like into nucleic acid molecules without modulating catalysis, and are incorporated by reference herein. In view of such teachings, similar modifications can be used as described herein to modify the siNA nucleic acid molecules of the instant invention so long as the ability of siNA to promote RNAi is cells is not significantly inhibited.

[0301] While chemical modification of oligonucleotide internucleotide linkages with phosphorothioate, phosphorodithioate, and/or 5′-methylphosphonate linkages improves stability, excessive modifications can cause some toxicity or decreased activity. Therefore, when designing nucleic acid molecules, the amount of these internucleotide linkages should be minimized. The reduction in the concentration of these linkages should lower toxicity, resulting in increased efficacy and higher specificity of these molecules.

[0302] Short interfering nucleic acid (siNA) molecules having chemical modifications that maintain or enhance activity are provided. Such a nucleic acid is also generally more resistant to nucleases than an unmodified nucleic acid. Accordingly, the in vitro and/or in vivo activity should not be significantly lowered. In cases in which modulation is the goal, therapeutic nucleic acid molecules delivered exogenously should optimally be stable within cells until translation of the target RNA has been modulated long enough to reduce the levels of the undesirable protein. This period of time varies between hours to days depending upon the disease state. Improvements in the chemical synthesis of RNA and DNA (Wincott et al., 1995, Nucleic Acids Res. 23, 2677; Caruthers et al., 1992, Methods in Enzymology 211,3-19 (incorporated by reference herein)) have expanded the ability to modify nucleic acid molecules by introducing nucleotide modifications to enhance their nuclease stability, as described above.

[0303] In one embodiment, nucleic acid molecules of the invention include one or more (e.g., about 1, 2, 3, 4, 5, 6, 7, 8, 9, 10, or more) G-clamp nucleotides. A G-clamp nucleotide is a modified cytosine analog wherein the modifications confer the ability to hydrogen bond both Watson-Crick and Hoogsteen faces of a complementary guanine within a duplex, see for example Lin and Matteucci, 1998, J. Am. Chem. Soc., 120, 8531-8532. A single G-clamp analog substitution within an oligonucleotide can result in substantially enhanced helical thermal stability and mismatch discrimination when hybridized to complementary oligonucleotides. The inclusion of such nucleotides in nucleic acid molecules of the invention results in both enhanced affinity and specificity to nucleic acid targets, complementary sequences, or template strands. In another embodiment, nucleic acid molecules of the invention include one or more (e.g., about 1, 2, 3, 4, 5, 6, 7, 8, 9, 10, or more) LNA “locked nucleic acid” nucleotides such as a 2′,4′-C methylene bicyclo nucleotide (see for example Wengel et al., International PCT Publication No. WO 00/66604 and WO 99/14226).

[0304] In another embodiment, the invention features conjugates and/or complexes of siNA molecules of the invention. Such conjugates and/or complexes can be used to facilitate delivery of siNA molecules into a biological system, such as a cell. The conjugates and complexes provided by the instant invention can impart therapeutic activity by transferring therapeutic compounds across cellular membranes, altering the pharmacokinetics, and/or modulating the localization of nucleic acid molecules of the invention. The present invention encompasses the design and synthesis of novel conjugates and complexes for the delivery of molecules, including, but not limited to, small molecules, lipids, cholesterol, phospholipids, nucleosides, nucleotides, nucleic acids, antibodies, toxins, negatively charged polymers and other polymers, for example proteins, peptides, hormones, carbohydrates, polyethylene glycols, or polyamines, across cellular membranes. In general, the transporters described are designed to be used either individually or as part of a multi-component system, with or without degradable linkers. These compounds are expected to improve delivery and/or localization of nucleic acid molecules of the invention into a number of cell types originating from different tissues, in the presence or absence of serum (see Sullenger and Cech, U.S. Pat. No. 5,854,038). Conjugates of the molecules described herein can be attached to biologically active molecules via linkers that are biodegradable, such as biodegradable nucleic acid linker molecules.

[0305] The term “biodegradable linker” as used herein, refers to a nucleic acid or non-nucleic acid linker molecule that is designed as a biodegradable linker to connect one molecule to another molecule, for example, a biologically active molecule to a siNA molecule of the invention or the sense and antisense strands of a siNA molecule of the invention. The biodegradable linker is designed such that its stability can be modulated for a particular purpose, such as delivery to a particular tissue or cell type. The stability of a nucleic acid-based biodegradable linker molecule can be modulated by using various chemistries, for example combinations of ribonucleotides, deoxyribonucleotides, and chemically-modified nucleotides, such as 2′-O-methyl, 2′-fluoro, 2′-amino, 2′-O-amino, 2′-C-allyl, 2′-O-allyl, and other 2′-modified or base modified nucleotides. The biodegradable nucleic acid linker molecule can be a dimer, trimer, tetramer or longer nucleic acid molecule, for example, an oligonucleotide of about 2, 3, 4, 5, 6, 7, 8, 9, 10, 11, 12, 13, 14, 15, 16, 17, 18, 19, or 20 nucleotides in length, or can comprise a single nucleotide with a phosphorus-based linkage, for example, a phosphoramidate or phosphodiester linkage. The biodegradable nucleic acid linker molecule can also comprise nucleic acid backbone, nucleic acid sugar, or nucleic acid base modifications.

[0306] The term “biodegradable” as used herein, refers to degradation in a biological system, for example enzymatic degradation or chemical degradation.

[0307] The term “biologically active molecule” as used herein, refers to compounds or molecules that are capable of eliciting or modifying a biological response in a system. Non-limiting examples of biologically active siNA molecules either alone or in combination with other molecules contemplated by the instant invention include therapeutically active molecules such as antibodies, cholesterol, hormones, antivirals, peptides, proteins, chemotherapeutics, small molecules, vitamins, co-factors, nucleosides, nucleotides, oligonucleotides, enzymatic nucleic acids, antisense nucleic acids, triplex forming oligonucleotides, 2,5-A chimeras, siNA, dsRNA, allozymes, aptamers, decoys and analogs thereof. Biologically active molecules of the invention also include molecules capable of modulating the pharmacokinetics and/or pharmacodynamics of other biologically active molecules, for example, lipids and polymers such as polyamines, polyamides, polyethylene glycol and other polyethers.

[0308] The term “phospholipid” as used herein, refers to a hydrophobic molecule comprising at least one phosphorus group. For example, a phospholipid can comprise a phosphorus-containing group and saturated or unsaturated alkyl group, optionally substituted with OH, COOH, oxo, amine, or substituted or unsubstituted aryl groups.

[0309] Therapeutic nucleic acid molecules (e.g., siNA molecules) delivered exogenously optimally are stable within cells until reverse transcription of the RNA has been modulated long enough to reduce the levels of the RNA transcript. The nucleic acid molecules are resistant to nucleases in order to function as effective intracellular therapeutic agents. Improvements in the chemical synthesis of nucleic acid molecules described in the instant invention and in the art have expanded the ability to modify nucleic acid molecules by introducing nucleotide modifications to enhance their nuclease stability as described above.

[0310] In yet another embodiment, siNA molecules having chemical modifications that maintain or enhance enzymatic activity of proteins involved in RNAi are provided. Such nucleic acids are also generally more resistant to nucleases than unmodified nucleic acids. Thus, in vitro and/or in vivo the activity should not be significantly lowered.

[0311] Use of the nucleic acid-based molecules of the invention will lead to better treatment of the disease progression by affording the possibility of combination therapies (e.g., multiple siNA molecules targeted to different genes; nucleic acid molecules coupled with known small molecule modulators; or intermittent treatment with combinations of molecules, including different motifs and/or other chemical or biological molecules). The treatment of subjects with siNA molecules can also include combinations of different types of nucleic acid molecules, such as enzymatic nucleic acid molecules (ribozymes), allozymes, antisense, 2,5-A oligoadenylate, decoys, and aptamers.

[0312] In another aspect a siNA molecule of the invention comprises one or more 5′ and/or a 3′-cap structure, for example on only the sense siNA strand, the antisense siNA strand, or both siNA strands.

[0313] By “cap structure” is meant chemical modifications, which have been incorporated at either terminus of the oligonucleotide (see, for example, Adamic et al., U.S. Pat. No. 5,998,203, incorporated by reference herein). These terminal modifications protect the nucleic acid molecule from exonuclease degradation, and may help in delivery and/or localization within a cell. The cap may be present at the 5′-terminus (5′-cap) or at the 3′-terminal (3′-cap) or may be present on both termini. In non-limiting examples, the 5′-cap includes, but is not limited to, glyceryl, inverted deoxy abasic residue (moiety); 4′,5′-methylene nucleotide; 1-(beta-D-erythrofuranosyl) nucleotide, 4′-thio nucleotide; carbocyclic nucleotide; 1,5-anhydrohexitol nucleotide; L-nucleotides; alpha-nucleotides; modified base nucleotide; phosphorodithioate linkage; threo-pentofuranosyl nucleotide; acyclic 3′,4′-seco nucleotide; acyclic 3,4-dihydroxybutyl nucleotide; acyclic 3,5-dihydroxypentyl nucleotide, 3′-3′-inverted nucleotide moiety; 3′-3′-inverted abasic moiety; 3′-2′-inverted nucleotide moiety; 3′-2′-inverted abasic moiety; 1,4-butanediol phosphate; 3′-phosphoramidate; hexylphosphate; aminohexyl phosphate; 3′-phosphate; 3′-phosphorothioate; phosphorodithioate; or bridging or non-bridging methylphosphonate moiety.

[0314] Non-limiting examples of the 3′-cap include, but are not limited to, glyceryl, inverted deoxy abasic residue (moiety), 4′,5′-methylene nucleotide; 1-(beta-D-erythrofuranosyl) nucleotide; 4′-thio nucleotide, carbocyclic nucleotide; 5′-amino-alkyl phosphate; 1,3-diamino-2-propyl phosphate; 3-aminopropyl phosphate; 6-aminohexyl phosphate; 1,2-aminododecyl phosphate; hydroxypropyl phosphate; 1,5-anhydrohexitol nucleotide; L-nucleotide; alpha-nucleotide; modified base nucleotide; phosphorodithioate; threo-pentofuranosyl nucleotide; acyclic 3′,4′-seco nucleotide; 3,4-dihydroxybutyl nucleotide; 3,5-dihydroxypentyl nucleotide, 5′-5′-inverted nucleotide moiety; 5′-5′-inverted abasic moiety; 5′-phosphoramidate; 5′-phosphorothioate; 1,4-butanediol phosphate; 5′-amino; bridging and/or non-bridging 5′-phosphoramidate, phosphorothioate and/or phosphorodithioate, bridging or non bridging methylphosphonate and 5′-mercapto moieties (for more details see Beaucage and Iyer, 1993, Tetrahedron 49, 1925; incorporated by reference herein).

[0315] By the term “non-nucleotide” is meant any group or compound which can be incorporated into a nucleic acid chain in the place of one or more nucleotide units, including either sugar and/or phosphate substitutions, and allows the remaining bases to exhibit their enzymatic activity. The group or compound is abasic in that it does not contain a commonly recognized nucleotide base, such as adenosine, guanine, cytosine, uracil or thymine and therefore lacks a base at the 1′-position.

[0316] An “alkyl” group refers to a saturated aliphatic hydrocarbon, including straight-chain, branched-chain, and cyclic alkyl groups. Preferably, the alkyl group has 1 to 12 carbons. More preferably, it is a lower alkyl of from 1 to 7 carbons, more preferably 1 to 4 carbons. The alkyl group can be substituted or unsubstituted. When substituted the substituted group(s) is preferably, hydroxyl, cyano, alkoxy, ═O, ═S, NO₂ or N(CH₃)₂, amino, or SH. The term also includes alkenyl groups that are unsaturated hydrocarbon groups containing at least one carbon-carbon double bond, including straight-chain, branched-chain, and cyclic groups. Preferably, the alkenyl group has 1 to 12 carbons. More preferably, it is a lower alkenyl of from 1 to 7 carbons, more preferably 1 to 4 carbons. The alkenyl group may be substituted or unsubstituted. When substituted the substituted group(s) is preferably, hydroxyl, cyano, alkoxy, ═O, ═S, NO₂, halogen, N(CH₃)₂, amino, or SH. The term “alkyl” also includes alkynyl groups that have an unsaturated hydrocarbon group containing at least one carbon-carbon triple bond, including straight-chain, branched-chain, and cyclic groups. Preferably, the alkynyl group has 1 to 12 carbons. More preferably, it is a lower alkynyl of from 1 to 7 carbons, more preferably 1 to 4 carbons. The alkynyl group may be substituted or unsubstituted. When substituted the substituted group(s) is preferably, hydroxyl, cyano, alkoxy, ═O, ═S, NO₂ or N(CH₃)₂, amino or SH.

[0317] Such alkyl groups can also include aryl, alkylaryl, carbocyclic aryl, heterocyclic aryl, amide and ester groups. An “aryl” group refers to an aromatic group that has at least one ring having a conjugated pi electron system and includes carbocyclic aryl, heterocyclic aryl and biaryl groups, all of which may be optionally substituted. The preferred substituent(s) of aryl groups are halogen, trihalomethyl, hydroxyl, SH, OH, cyano, alkoxy, alkyl, alkenyl, alkynyl, and amino groups. An “alkylaryl” group refers to an alkyl group (as described above) covalently joined to an aryl group (as described above). Carbocyclic aryl groups are groups wherein the ring atoms on the aromatic ring are all carbon atoms. The carbon atoms are optionally substituted. Heterocyclic aryl groups are groups having from 1 to 3 heteroatoms as ring atoms in the aromatic ring and the remainder of the ring atoms are carbon atoms. Suitable heteroatoms include oxygen, sulfur, and nitrogen, and include furanyl, thienyl, pyridyl, pyrrolyl, N-lower alkyl pyrrolo, pyrimidyl, pyrazinyl, imidazolyl and the like, all optionally substituted. An “amide” refers to an —C(O)—NH—R, where R is either alkyl, aryl, alkylaryl or hydrogen. An “ester” refers to an —C(O)—OR, where R is either alkyl, aryl, alkylaryl or hydrogen.

[0318] By “nucleotide” as used herein is as recognized in the art to include natural bases (standard), and modified bases well known in the art. Such bases are generally located at the 1′ position of a nucleotide sugar moiety. Nucleotides generally comprise a base, sugar and a phosphate group. The nucleotides can be unmodified or modified at the sugar, phosphate and/or base moiety, (also referred to interchangeably as nucleotide analogs, modified nucleotides, non-natural nucleotides, non-standard nucleotides and other; see, for example, Usman and McSwiggen, supra; Eckstein et al., International PCT Publication No. WO 92/07065; Usman et al., International PCT Publication No. WO 93/15187; Uhlman & Peyman, supra, all are hereby incorporated by reference herein). There are several examples of modified nucleic acid bases known in the art as summarized by Limbach et al., 1994, Nucleic Acids Res. 22, 2183. Some of the non-limiting examples of base modifications that can be introduced into nucleic acid molecules include, inosine, purine, pyridin-4-one, pyridin-2-one, phenyl, pseudouracil, 2, 4, 6-trimethoxy benzene, 3-methyl uracil, dihydrouridine, naphthyl, aminophenyl, 5-alkylcytidines (e.g., 5-methylcytidine), 5-alkyluridines (e.g., ribothymidine), 5-halouridine (e.g., 5-bromouridine) or 6-azapyrimidines or 6-alkylpyrimidines (e.g. 6-methyluridine), propyne, and others (Burgin et al., 1996, Biochemistry, 35, 14090; Uhlman & Peyman, supra). By “modified bases” in this aspect is meant nucleotide bases other than adenine, guanine, cytosine and uracil at 1′ position or their equivalents.

[0319] In one embodiment, the invention features modified siNA molecules, with phosphate backbone modifications comprising one or more phosphorothioate, phosphorodithioate, methylphosphonate, phosphotriester, morpholino, amidate carbamate, carboxymethyl, acetamidate, polyamide, sulfonate, sulfonamide, sulfamate, formacetal, thioformacetal, and/or alkylsilyl, substitutions. For a review of oligonucleotide backbone modifications, see Hunziker and Leumann, 1995, Nucleic Acid Analogues: Synthesis and Properties, in Modern Synthetic Methods, VCH, 331-417, and Mesmaeker et al., 1994, Novel Backbone Replacements for Oligonucleotides, in Carbohydrate Modifications in Antisense Research, ACS, 24-39.

[0320] By “abasic” is meant sugar moieties lacking a base or having other chemical groups in place of a base at the 1′ position, see for example Adamic et al., U.S. Pat. No. 5,998,203.

[0321] By “unmodified nucleoside” is meant one of the bases adenine, cytosine, guanine, thymine, or uracil joined to the 1′ carbon of β-D-ribo-furanose.

[0322] By “modified nucleoside” is meant any nucleotide base which contains a modification in the chemical structure of an unmodified nucleotide base, sugar and/or phosphate. Non-limiting examples of modified nucleotides are shown by Formulae I-VII and/or other modifications described herein.

[0323] In connection with 2′-modified nucleotides as described for the present invention, by “amino” is meant 2′-NH₂ or 2′-O—NH₂, which can be modified or unmodified. Such modified groups are described, for example, in Eckstein et al., U.S. Pat. No. 5,672,695 and Matulic-Adamic et al., U.S. Pat. No. 6,248,878, which are both incorporated by reference in their entireties.

[0324] Various modifications to nucleic acid siNA structure can be made to enhance the utility of these molecules. Such modifications will enhance shelf-life, half-life in vitro, stability, and ease of introduction of such oligonucleotides to the target site, e.g., to enhance penetration of cellular membranes, and confer the ability to recognize and bind to targeted cells.

[0325] Administration of Nucleic Acid Molecules

[0326] A siNA molecule of the invention can be adapted for use to treat, for example, tumor angiogenesis and cancer, including but not limited to breast cancer, lung cancer (including non-small cell lung carcinoma), prostate cancer, colorectal cancer, brain cancer, esophageal cancer, bladder cancer, pancreatic cancer, cervical cancer, head and neck cancer, skin cancers, nasopharyngeal carcinoma, liposarcoma, epithelial carcinoma, renal cell carcinoma, gallbladder adeno carcinoma, parotid adenocarcinoma, ovarian cancer, melanoma, lymphoma, glioma, endometrial sarcoma, multidrug resistant cancers, diabetic retinopathy, macular degeneration, neovascular glaucoma, myopic degeneration, arthritis, psoriasis, endometriosis, female reproduction, verruca vulgaris, angiofibroma of tuberous sclerosis, pot-wine stains, Sturge Weber syndrome, Kippel-Trenaunay-Weber syndrome, Osler-Weber-Rendu syndrome, renal disease such as Autosomal dominant polycystic kidney disease (ADPKD), and any other diseases or conditions that are related to or will respond to the levels of VEGF, VEGFr1, VEGFr2 and/or VEGFr3 in a cell or tissue, alone or in combination with other therapies. For example, a siNA molecule can comprise a delivery vehicle, including liposomes, for administration to a subject, carriers and diluents and their salts, and/or can be present in pharmaceutically acceptable formulations. Methods for the delivery of nucleic acid molecules are described in Akhtar et al., 1992, Trends Cell Bio., 2, 139; Delivery Strategies for Antisense Oligonucleotide Therapeutics, ed. Akhtar, 1995, Maurer et al., 1999, Mol. Membr. Biol., 16, 129-140; Hofland and Huang, 1999, Handb. Exp. Pharmacol., 137, 165-192; and Lee et al., 2000, ACS Symp. Ser., 752, 184-192, all of which are incorporated herein by reference. Beigelman et al., U.S. Pat. No. 6,395,713 and Sullivan et al., PCT WO 94/02595 further describe the general methods for delivery of nucleic acid molecules. These protocols can be utilized for the delivery of virtually any nucleic acid molecule. Nucleic acid molecules can be administered to cells by a variety of methods known to those of skill in the art, including, but not restricted to, encapsulation in liposomes, by iontophoresis, or by incorporation into other vehicles, such as biodegradable polymers, hydrogels, cyclodextrins (see for example Gonzalez et al., 1999, Bioconjugate Chem., 10, 1068-1074; Wang et al., International PCT publication Nos. WO 03/47518 and WO 03/46185), poly(lactic-co-glycolic)acid (PLGA) and PLCA microspheres (see for example U.S. Pat. No. 6,447,796 and US Patent Application Publication No. US 2002130430), biodegradable nanocapsules, and bioadhesive microspheres, or by proteinaceous vectors (O'Hare and Normand, International PCT Publication No. WO 00/53722). In another embodiment, the nucleic acid molecules of the invention can also be formulated or complexed with polyethyleneimine and derivatives thereof, such as polyethyleneimine-polyethyleneglycol-N-acetylgalactosamine (PEI-PEG-GAL) or polyethyleneimine-polyethyleneglycol-tri-N-acetylgalactosamine (PEI-PEG-triGAL) derivatives. Alternatively, the nucleic acid/vehicle combination is locally delivered by direct injection or by use of an infusion pump. Direct injection of the nucleic acid molecules of the invention, whether subcutaneous, intramuscular, or intradermal, can take place using standard needle and syringe methodologies, or by needle-free technologies such as those described in Conry et al., 1999, Clin. Cancer Res., 5, 2330-2337 and Barry et al., International PCT Publication No. WO 99/31262. The molecules of the instant invention can be used as pharmaceutical agents. Pharmaceutical agents prevent, modulate the occurrence, or treat (alleviate a symptom to some extent, preferably all of the symptoms) of a disease state in a subject.

[0327] In one embodiment, a siNA molecule of the invention is designed or formulated to specifically target endothelial cells or tumor cells. For example, various formulations and conjugates can be utilized to specifically target endothelial cells or tumor cells, including PEI-PEG-folate, PEI-PEG-RGD, PEI-PEG-biotin, PEI-PEG-cholesterol, and other conjugates known in the art that enable specific targeting to endothelial cells and/or tumor cells.

[0328] In one embodiment, a compound, molecule, or composition for the treatment of ocular conditions (e.g., macular degeneration, diabetic retinopathy etc.) is administered to a subject intraocularly or by intraocular means. In another embodiment, a compound, molecule, or composition for the treatment of ocular conditions (e.g., macular degeneration, diabetic retinopathy etc.) is administered to a subject periocularly or by periocular means (see for example Ahlheim et al., International PCT publication No. WO 03/24420). In one embodiment, a siNA molecule and/or formulation or composition thereof is administered to a subject intraocularly or by intraocular means. In another embodiment, a siNA molecule and/or formulation or composition thereof is administered to a subject periocularly or by periocular means. Periocular administration generally provides a less invasive approach to administering siNA molecules and formulation or composition thereof to a subject (see for example Ahlheim et al., International PCT publication No. WO 03/24420). The use of periocular administraction also minimizes the risk of retinal detachment, allows for more frequent dosing or administraction, provides a clinically relevant route of administraction for macular degeneration and other optic conditions, and also provides the possibility of using reservoirs (e.g., implants, pumps or other devices) for drug delivery.

[0329] In one embodiment, a siNA molecule of the invention is complexed with membrane disruptive agents such as those described in U.S. Patent Application Publication No. 20010007666, incorporated by reference herein in its entirety including the drawings. In another embodiment, the membrane disruptive agent or agents and the siNA molecule are also complexed with a cationic lipid or helper lipid molecule, such as those lipids described in U.S. Pat. No. 6,235,310, incorporated by reference herein in its entirety including the drawings.

[0330] Thus, the invention features a pharmaceutical composition comprising one or more nucleic acid(s) of the invention in an acceptable carrier, such as a stabilizer, buffer, and the like. The polynucleotides of the invention can be administered (e.g., RNA, DNA or protein) and introduced into a subject by any standard means, with or without stabilizers, buffers, and the like, to form a pharmaceutical composition. When it is desired to use a liposome delivery mechanism, standard protocols for formation of liposomes can be followed. The compositions of the present invention can also be formulated and used as tablets, capsules or elixirs for oral administration, suppositories for rectal administration, sterile solutions, suspensions for injectable administration, and the other compositions known in the art.

[0331] The present invention also includes pharmaceutically acceptable formulations of the compounds described. These formulations include salts of the above compounds, e.g., acid addition salts, for example, salts of hydrochloric, hydrobromic, acetic acid, and benzene sulfonic acid.

[0332] A pharmacological composition or formulation refers to a composition or formulation in a form suitable for administration, e.g., systemic administration, into a cell or subject, including for example a human. Suitable forms, in part, depend upon the use or the route of entry, for example oral, transdermal, or by injection. Such forms should not prevent the composition or formulation from reaching a target cell (i.e., a cell to which the negatively charged nucleic acid is desirable for delivery). For example, pharmacological compositions injected into the blood stream should be soluble. Other factors are known in the art, and include considerations such as toxicity and forms that prevent the composition or formulation from exerting its effect.

[0333] By “systemic administration” is meant in vivo systemic absorption or accumulation of drugs in the blood stream followed by distribution throughout the entire body. Administration routes that lead to systemic absorption include, without limitation: intravenous, subcutaneous, intraperitoneal, inhalation, oral, intrapulmonary and intramuscular. Each of these administration routes exposes the siNA molecules of the invention to an accessible diseased tissue. The rate of entry of a drug into the circulation has been shown to be a function of molecular weight or size. The use of a liposome or other drug carrier comprising the compounds of the instant invention can potentially localize the drug, for example, in certain tissue types, such as the tissues of the reticular endothelial system (RES). A liposome formulation that can facilitate the association of drug with the surface of cells, such as, lymphocytes and macrophages is also useful. This approach can provide enhanced delivery of the drug to target cells by taking advantage of the specificity of macrophage and lymphocyte immune recognition of abnormal cells, such as cells producing excess VEGF and/or VEGFr.

[0334] By “pharmaceutically acceptable formulation” is meant, a composition or formulation that allows for the effective distribution of the nucleic acid molecules of the instant invention in the physical location most suitable for their desired activity. Non-limiting examples of agents suitable for formulation with the nucleic acid molecules of the instant invention include: P-glycoprotein inhibitors (such as Pluronic P85), which can enhance entry of drugs into the CNS (Jolliet-Riant and Tillement, 1999, Fundam. Clin. Pharmacol., 13, 16-26); biodegradable polymers, such as poly (DL-lactide-coglycolide) microspheres for sustained release delivery after intracerebral implantation (Emerich, DF et al, 1999, Cell Transplant, 8, 47-58) (Alkermes, Inc. Cambridge, Mass.); and loaded nanoparticles, such as those made of polybutylcyanoacrylate, which can deliver drugs across the blood brain barrier and can alter neuronal uptake mechanisms (Prog Neuropsychopharmacol Biol Psychiatry, 23, 941-949, 1999). Other non-limiting examples of delivery strategies for the nucleic acid molecules of the instant invention include material described in Boado et al., 1998, J. Pharm. Sci., 87, 1308-1315; Tyler et al., 1999, FEBS Lett., 421, 280-284; Pardridge et al., 1995, PNAS USA., 92, 5592-5596; Boado, 1995, Adv. Drug Delivery Rev., 15, 73-107; Aldrian-Herrada et al., 1998, Nucleic Acids Res., 26, 4910-4916; and Tyler et al., 1999, PNAS USA., 96, 7053-7058.

[0335] The invention also features the use of the composition comprising surface-modified liposomes containing poly (ethylene glycol) lipids (PEG-modified, or long-circulating liposomes or stealth liposomes). These formulations offer a method for increasing the accumulation of drugs in target tissues. This class of drug carriers resists opsonization and elimination by the mononuclear phagocytic system (MPS or RES), thereby enabling longer blood circulation times and enhanced tissue exposure for the encapsulated drug (Lasic et al. Chem. Rev. 1995, 95, 2601-2627; Ishiwata et al., Chem. Pharm. Bull. 1995, 43, 1005-1011). Such liposomes have been shown to accumulate selectively in tumors, presumably by extravasation and capture in the neovascularized target tissues (Lasic et al., Science 1995, 267, 1275-1276; Oku et al., 1995, Biochim. Biophys. Acta, 1238, 86-90). The long-circulating liposomes enhance the pharmacokinetics and pharmacodynamics of DNA and RNA, particularly compared to conventional cationic liposomes which are known to accumulate in tissues of the MPS (Liu et al., J. Biol. Chem. 1995, 42, 24864-24870; Choi et al., International PCT Publication No. WO 96/10391; Ansell et al., International PCT Publication No. WO 96/10390; Holland et al., International PCT Publication No. WO 96/10392). Long-circulating liposomes are also likely to protect drugs from nuclease degradation to a greater extent compared to cationic liposomes, based on their ability to avoid accumulation in metabolically aggressive MPS tissues such as the liver and spleen.

[0336] The present invention also includes compositions prepared for storage or administration that include a pharmaceutically effective amount of the desired compounds in a pharmaceutically acceptable carrier or diluent. Acceptable carriers or diluents for therapeutic use are well known in the pharmaceutical art, and are described, for example, in Remington's Pharmaceutical Sciences, Mack Publishing Co. (A. R. Gennaro edit. 1985), hereby incorporated by reference herein. For example, preservatives, stabilizers, dyes and flavoring agents can be provided. These include sodium benzoate, sorbic acid and esters of p-hydroxybenzoic acid. In addition, antioxidants and suspending agents can be used.

[0337] A pharmaceutically effective dose is that dose required to prevent, inhibit the occurrence, or treat (alleviate a symptom to some extent, preferably all of the symptoms) of a disease state. The pharmaceutically effective dose depends on the type of disease, the composition used, the route of administration, the type of mammal being treated, the physical characteristics of the specific mammal under consideration, concurrent medication, and other factors that those skilled in the medical arts will recognize. Generally, an amount between 0.1 mg/kg and 100 mg/kg body weight/day of active ingredients is administered dependent upon potency of the negatively charged polymer.

[0338] The nucleic acid molecules of the invention and formulations thereof can be administered orally, topically, parenterally, by inhalation or spray, or rectally in dosage unit formulations containing conventional non-toxic pharmaceutically acceptable carriers, adjuvants and/or vehicles. The term parenteral as used herein includes percutaneous, subcutaneous, intravascular (e.g., intravenous), intramuscular, or intrathecal injection or infusion techniques and the like. In addition, there is provided a pharmaceutical formulation comprising a nucleic acid molecule of the invention and a pharmaceutically acceptable carrier. One or more nucleic acid molecules of the invention can be present in association with one or more non-toxic pharmaceutically acceptable carriers and/or diluents and/or adjuvants, and if desired other active ingredients. The pharmaceutical compositions containing nucleic acid molecules of the invention can be in a form suitable for oral use, for example, as tablets, troches, lozenges, aqueous or oily suspensions, dispersible powders or granules, emulsion, hard or soft capsules, or syrups or elixirs.

[0339] Compositions intended for oral use can be prepared according to any method known to the art for the manufacture of pharmaceutical compositions and such compositions can contain one or more such sweetening agents, flavoring agents, coloring agents or preservative agents in order to provide pharmaceutically elegant and palatable preparations. Tablets contain the active ingredient in admixture with non-toxic pharmaceutically acceptable excipients that are suitable for the manufacture of tablets. These excipients can be, for example, inert diluents; such as calcium carbonate, sodium carbonate, lactose, calcium phosphate or sodium phosphate; granulating and disintegrating agents, for example, corn starch, or alginic acid; binding agents, for example starch, gelatin or acacia; and lubricating agents, for example magnesium stearate, stearic acid or talc. The tablets can be uncoated or they can be coated by known techniques. In some cases such coatings can be prepared by known techniques to delay disintegration and absorption in the gastrointestinal tract and thereby provide a sustained action over a longer period. For example, a time delay material such as glyceryl monosterate or glyceryl distearate can be employed.

[0340] Formulations for oral use can also be presented as hard gelatin capsules wherein the active ingredient is mixed with an inert solid diluent, for example, calcium carbonate, calcium phosphate or kaolin, or as soft gelatin capsules wherein the active ingredient is mixed with water or an oil medium, for example peanut oil, liquid paraffin or olive oil.

[0341] Aqueous suspensions contain the active materials in a mixture with excipients suitable for the manufacture of aqueous suspensions. Such excipients are suspending agents, for example sodium carboxymethylcellulose, methylcellulose, hydropropyl-methylcellulose, sodium alginate, polyvinylpyrrolidone, gum tragacanth and gum acacia; dispersing or wetting agents can be a naturally-occurring phosphatide, for example, lecithin, or condensation products of an alkylene oxide with fatty acids, for example polyoxyethylene stearate, or condensation products of ethylene oxide with long chain aliphatic alcohols, for example heptadecaethyleneoxycetanol, or condensation products of ethylene oxide with partial esters derived from fatty acids and a hexitol such as polyoxyethylene sorbitol monooleate, or condensation products of ethylene oxide with partial esters derived from fatty acids and hexitol anhydrides, for example polyethylene sorbitan monooleate. The aqueous suspensions can also contain one or more preservatives, for example ethyl, or n-propyl p-hydroxybenzoate, one or more coloring agents, one or more flavoring agents, and one or more sweetening agents, such as sucrose or saccharin.

[0342] Oily suspensions can be formulated by suspending the active ingredients in a vegetable oil, for example arachis oil, olive oil, sesame oil or coconut oil, or in a mineral oil such as liquid paraffin. The oily suspensions can contain a thickening agent, for example beeswax, hard paraffin or cetyl alcohol. Sweetening agents and flavoring agents can be added to provide palatable oral preparations. These compositions can be preserved by the addition of an anti-oxidant such as ascorbic acid

[0343] Dispersible powders and granules suitable for preparation of an aqueous suspension by the addition of water provide the active ingredient in admixture with a dispersing or wetting agent, suspending agent and one or more preservatives. Suitable dispersing or wetting agents or suspending agents are exemplified by those already mentioned above. Additional excipients, for example sweetening, flavoring and coloring agents, can also be present.

[0344] Pharmaceutical compositions of the invention can also be in the form of oil-in-water emulsions. The oily phase can be a vegetable oil or a mineral oil or mixtures of these. Suitable emulsifying agents can be naturally-occurring gums, for example gum acacia or gum tragacanth, naturally-occurring phosphatides, for example soy bean, lecithin, and esters or partial esters derived from fatty acids and hexitol, anhydrides, for example sorbitan monooleate, and condensation products of the said partial esters with ethylene oxide, for example polyoxyethylene sorbitan monooleate. The emulsions can also contain sweetening and flavoring agents.

[0345] Syrups and elixirs can be formulated with sweetening agents, for example glycerol, propylene glycol, sorbitol, glucose or sucrose. Such formulations can also contain a demulcent, a preservative and flavoring and coloring agents. The pharmaceutical compositions can be in the form of a sterile injectable aqueous or oleaginous suspension. This suspension can be formulated according to the known art using those suitable dispersing or wetting agents and suspending agents that have been mentioned above. The sterile injectable preparation can also be a sterile injectable solution or suspension in a non-toxic parentally acceptable diluent or solvent, for example as a solution in 1,3-butanediol. Among the acceptable vehicles and solvents that can be employed are water, Ringer's solution and isotonic sodium chloride solution. In addition, sterile, fixed oils are conventionally employed as a solvent or suspending medium. For this purpose, any bland fixed oil can be employed including synthetic mono-or diglycerides. In addition, fatty acids such as oleic acid find use in the preparation of injectables.

[0346] The nucleic acid molecules of the invention can also be administered in the form of suppositories, e.g., for rectal administration of the drug. These compositions can be prepared by mixing the drug with a suitable non-irritating excipient that is solid at ordinary temperatures but liquid at the rectal temperature and will therefore melt in the rectum to release the drug. Such materials include cocoa butter and polyethylene glycols.

[0347] Nucleic acid molecules of the invention can be administered parenterally in a sterile medium. The drug, depending on the vehicle and concentration used, can either be suspended or dissolved in the vehicle. Advantageously, adjuvants such as local anesthetics, preservatives and buffering agents can be dissolved in the vehicle.

[0348] Dosage levels of the order of from about 0.1 mg to about 140 mg per kilogram of body weight per day are useful in the treatment of the above-indicated conditions (about 0.5 mg to about 7 g per subject per day). The amount of active ingredient that can be combined with the carrier materials to produce a single dosage form varies depending upon the host treated and the particular mode of administration. Dosage unit forms generally contain between from about 1 mg to about 500 mg of an active ingredient.

[0349] It is understood that the specific dose level for any particular subject depends upon a variety of factors including the activity of the specific compound employed, the age, body weight, general health, sex, diet, time of administration, route of administration, and rate of excretion, drug combination and the severity of the particular disease undergoing therapy.

[0350] For administration to non-human animals, the composition can also be added to the animal feed or drinking water. It can be convenient to formulate the animal feed and drinking water compositions so that the animal takes in a therapeutically appropriate quantity of the composition along with its diet. It can also be convenient to present the composition as a premix for addition to the feed or drinking water.

[0351] The nucleic acid molecules of the present invention can also be administered to a subject in combination with other therapeutic compounds to increase the overall therapeutic effect. The use of multiple compounds to treat an indication can increase the beneficial effects while reducing the presence of side effects.

[0352] In one embodiment, the invention comprises compositions suitable for administering nucleic acid molecules of the invention to specific cell types. For example, the asialoglycoprotein receptor (ASGPr) (Wu and Wu, 1987, J. Biol. Chem. 262, 4429-4432) is unique to hepatocytes and binds branched galactose-terminal glycoproteins, such as asialoorosomucoid (ASOR). In another example, the folate receptor is overexpressed in many cancer cells. Binding of such glycoproteins, synthetic glycoconjugates, or folates to the receptor takes place with an affinity that strongly depends on the degree of branching of the oligosaccharide chain, for example, triatennary structures are bound with greater affinity than biatenarry or monoatennary chains (Baenziger and Fiete, 1980, Cell, 22, 611-620; Connolly et al., 1982, J. Biol. Chem., 257, 939-945). Lee and Lee, 1987, Glycoconjugate J., 4, 317-328, obtained this high specificity through the use of N-acetyl-D-galactosamine as the carbohydrate moiety, which has higher affinity for the receptor, compared to galactose. This “clustering effect” has also been described for the binding and uptake of mannosyl-terminating glycoproteins or glycoconjugates (Ponpipom et al., 1981, J. Med. Chem., 24, 1388-1395). The use of galactose, galactosamine, or folate based conjugates to transport exogenous compounds across cell membranes can provide a targeted delivery approach to, for example, the treatment of liver disease, cancers of the liver, or other cancers. The use of bioconjugates can also provide a reduction in the required dose of therapeutic compounds required for treatment. Furthermore, therapeutic bioavialability, pharmacodynamics, and pharmacokinetic parameters can be modulated through the use of nucleic acid bioconjugates of the invention. Non-limiting examples of such bioconjugates are described in Vargeese et al., U.S. Ser. No. 10/201,394, filed Aug. 13, 2001; and Matulic-Adamic et al., U.S. Ser. No. 10/151,116, filed May 17, 2002. In one embodiment, nucleic acid molecules of the invention are complexed with or covalently attached to nanoparticles, such as Hepatitis B virus S, M, or L evelope proteins (see for example Yamado et al., 2003, Nature Biotechnology, 21, 885). In one embodiment, nucleic acid molecules of the invention are delivered with specificity for human tumor cells, specifically non-apoptotic human tumor cells including for example T-cells, hepatocytes, breast carcinoma cells, ovarian carcinoma cells, melanoma cells, intestinal epithelial cells, prostate cells, testicular cells, non-small cell lung cancers, small cell lung cancers, etc.

[0353] Alternatively, certain siNA molecules of the instant invention can be expressed within cells from eukaryotic promoters (e.g., Izant and Weintraub, 1985, Science, 229, 345; McGarry and Lindquist, 1986, Proc. Natl. Acad. Sci., USA 83, 399; Scanlon et al., 1991, Proc. Natl. Acad. Sci. USA, 88, 10591-5; Kashani-Sabet et al., 1992, Antisense Res. Dev., 2, 3-15; Dropulic et al., 1992, J. Virol., 66, 1432-41; Weerasinghe et al., 1991, J. Virol., 65, 5531-4; Ojwang et al., 1992, Proc. Natl. Acad. Sci. USA, 89, 10802-6; Chen et al., 1992, Nucleic Acids Res., 20, 4581-9; Sarver et al., 1990 Science, 247, 1222-1225; Thompson et al., 1995, Nucleic Acids Res., 23, 2259; Good et al., 1997, Gene Therapy, 4, 45. Those skilled in the art realize that any nucleic acid can be expressed in eukaryotic cells from the appropriate DNA/RNA vector. The activity of such nucleic acids can be augmented by their release from the primary transcript by a enzymatic nucleic acid (Draper et al., PCT WO 93/23569, and Sullivan et al., PCT WO 94/02595; Ohkawa et al., 1992, Nucleic Acids Symp. Ser., 27, 15-6; Taira et al., 1991, Nucleic Acids Res., 19, 5125-30; Ventura et al., 1993, Nucleic Acids Res., 21, 3249-55; Chowrira et al., 1994, J. Biol. Chem., 269, 25856.

[0354] In another aspect of the invention, RNA molecules of the present invention can be expressed from transcription units (see for example Couture et al., 1996, TIG., 12, 510) inserted into DNA or RNA vectors. The recombinant vectors can be DNA plasmids or viral vectors. siNA expressing viral vectors can be constructed based on, but not limited to, adeno-associated virus, retrovirus, adenovirus, or alphavirus. In another embodiment, pol III based constructs are used to express nucleic acid molecules of the invention (see for example Thompson, U.S. Pats. Nos. 5,902,880 and 6,146,886). The recombinant vectors capable of expressing the siNA molecules can be delivered as described above, and persist in target cells. Alternatively, viral vectors can be used that provide for transient expression of nucleic acid molecules. Such vectors can be repeatedly administered as necessary. Once expressed, the siNA molecule interacts with the target mRNA and generates an RNAi response. Delivery of siNA molecule expressing vectors can be systemic, such as by intravenous or intra-muscular administration, by administration to target cells ex-planted from a subject followed by reintroduction into the subject, or by any other means that would allow for introduction into the desired target cell (for a review see Couture et al., 1996, TIG., 12, 510).

[0355] In one aspect the invention features an expression vector comprising a nucleic acid sequence encoding at least one siNA molecule of the instant invention. The expression vector can encode one or both strands of a siNA duplex, or a single self-complementary strand that self hybridizes into a siNA duplex. The nucleic acid sequences encoding the siNA molecules of the instant invention can be operably linked in a manner that allows expression of the siNA molecule (see for example Paul et al., 2002, Nature Biotechnology, 19, 505; Miyagishi and Taira, 2002, Nature Biotechnology, 19, 497; Lee et al., 2002, Nature Biotechnology, 19, 500; and Novina et al., 2002, Nature Medicine, advance online publication doi: 10.1038/nm725).

[0356] In another aspect, the invention features an expression vector comprising: a) a transcription initiation region (e.g., eukaryotic pol I, II or III initiation region); b) a transcription termination region (e.g., eukaryotic pol I, II or III termination region); and c) a nucleic acid sequence encoding at least one of the siNA molecules of the instant invention, wherein said sequence is operably linked to said initiation region and said termination region in a manner that allows expression and/or delivery of the siNA molecule. The vector can optionally include an open reading frame (ORF) for a protein operably linked on the 5′ side or the 3′-side of the sequence encoding the siNA of the invention; and/or an intron (intervening sequences).

[0357] Transcription of the siNA molecule sequences can be driven from a promoter for eukaryotic RNA polymerase I (pol I), RNA polymerase II (pol II), or RNA polymerase III (pol III). Transcripts from pol II or pol III promoters are expressed at high levels in all cells; the levels of a given pol II promoter in a given cell type depends on the nature of the gene regulatory sequences (enhancers, silencers, etc.) present nearby. Prokaryotic RNA polymerase promoters are also used, providing that the prokaryotic RNA polymerase enzyme is expressed in the appropriate cells (Elroy-Stein and Moss, 1990, Proc. Natl. Acad. Sci. USA, 87, 6743-7; Gao and Huang 1993, Nucleic Acids Res., 21, 2867-72; Lieber et al., 1993, Methods Enzymol., 217, 47-66; Zhou et al., 1990, Mol. Cell. Biol., 10, 4529-37). Several investigators have demonstrated that nucleic acid molecules expressed from such promoters can function in mammalian cells (e.g. Kashani-Sabet et al., 1992, Antisense Res. Dev., 2, 3-15; Ojwang et al., 1992, Proc. Natl. Acad. Sci. USA, 89, 10802-6; Chen et al., 1992, Nucleic Acids Res., 20, 4581-9; Yu et al., 1993, Proc. Natl. Acad. Sci. USA, 90, 6340-4; L'Huillier et al., 1992, EMBO J, 11, 4411-8; Lisziewicz et al., 1993, Proc. Natl. Acad. Sci. U.S.A, 90, 8000-4; Thompson et al., 1995, Nucleic Acids Res., 23, 2259; Sullenger & Cech, 1993, Science, 262, 1566). More specifically, transcription units such as the ones derived from genes encoding U6 small nuclear (snRNA), transfer RNA (tRNA) and adenovirus VA RNA are useful in generating high concentrations of desired RNA molecules such as siNA in cells (Thompson et al., supra; Couture and Stinchcomb, 1996, supra; Noonberg et al., 1994, Nucleic Acid Res., 22, 2830; Noonberg et al., U.S. Pat. No. 5,624,803; Good et al., 1997, Gene Ther., 4, 45; Beigelman et al., International PCT Publication No. WO 96/18736. The above siNA transcription units can be incorporated into a variety of vectors for introduction into mammalian cells, including but not restricted to, plasmid DNA vectors, viral DNA vectors (such as adenovirus or adeno-associated virus vectors), or viral RNA vectors (such as retroviral or alphavirus vectors) (for a review see Couture and Stinchcomb, 1996, supra).

[0358] In another aspect the invention features an expression vector comprising a nucleic acid sequence encoding at least one of the siNA molecules of the invention in a manner that allows expression of that siNA molecule. The expression vector comprises in one embodiment; a) a transcription initiation region; b) a transcription termination region; and c) a nucleic acid sequence encoding at least one strand of the siNA molecule, wherein the sequence is operably linked to the initiation region and the termination region in a manner that allows expression and/or delivery of the siNA molecule.

[0359] In another embodiment the expression vector comprises: a) a transcription initiation region; b) a transcription termination region; c) an open reading frame; and d) a nucleic acid sequence encoding at least one strand of a siNA molecule, wherein the sequence is operably linked to the 3′-end of the open reading frame and wherein the sequence is operably linked to the initiation region, the open reading frame and the termination region in a manner that allows expression and/or delivery of the siNA molecule. In yet another embodiment, the expression vector comprises: a) a transcription initiation region; b) a transcription termination region; c) an intron; and d) a nucleic acid sequence encoding at least one siNA molecule, wherein the sequence is operably linked to the initiation region, the intron and the termination region in a manner which allows expression and/or delivery of the nucleic acid molecule.

[0360] In another embodiment, the expression vector comprises: a) a transcription initiation region; b) a transcription termination region; c) an intron; d) an open reading frame; and e) a nucleic acid sequence encoding at least one strand of a siNA molecule, wherein the sequence is operably linked to the 3′-end of the open reading frame and wherein the sequence is operably linked to the initiation region, the intron, the open reading frame and the termination region in a manner which allows expression and/or delivery of the siNA molecule.

[0361] VEGF/VEGFr Biology and Biochemistry

[0362] The following discussion is adapted from R&D Systems, Cytokine Mini Reviews, Vascular Endothelial Growth Factor (VEGF), Copyright (©2002 R&D Systems. Angiogenesis is a process of new blood vessel development from pre-existing vasculature. It plays an essential role in embryonic development, normal growth of tissues, wound healing, the female reproductive cycle (i.e., ovulation, menstruation and placental development), as well as a major role in many diseases. Particular interest has focused on cancer, since tumors cannot grow beyond a few millimeters in size without developing a new blood supply. Angiogenesis is also necessary for the spread and growth of tumor cell metastases.

[0363] One of the most important growth and survival factors for endothelium is vascular endothelial growth factor (VEGF). VEGF induces angiogenesis and endothelial cell proliferation and plays an important role in regulating vasculogenesis. VEGF is a heparin-binding glycoprotein that is secreted as a homodimer of 45 kDa. Most types of cells, but usually not endothelial cells themselves, secrete VEGF. Since the initially discovered VEGF, VEGF-A, increases vascular permeability, it was known as vascular permeability factor. In addition, VEGF causes vasodilatation, partly through stimulation of nitric oxide synthase in endothelial cells. VEGF can also stimulate cell migration and inhibit apoptosis.

[0364] There are several splice variants of VEGF-A. The major ones include: 121, 165, 189 and 206 amino acids (aa), each one comprising a specific exon addition. VEGF165 is the most predominant protein, but transcripts of VEGF 121 may be more abundant. VEGF206 is rarely expressed and has been detected only in fetal liver. Recently, other splice variants of 145 and 183 aa have also been described. The 165, 189 and 206 aa splice variants have heparin-binding domains, which help anchor them in extracellular matrix and are involved in binding to heparin sulfate and presentation to VEGF receptors. Such presentation is a key factor for VEGF potency (i.e., the heparin-binding forms are more active). Several other members of the VEGF family have been cloned including VEGF-B, -C, and -D. Placenta growth factor (P1GF) is also closely related to VEGF-A. VEGF-A, -B, -C, -D, and P1GF are all distantly related to platelet-derived growth factors -A and -B. Less is known about the function and regulation of VEGF-B, —C, and -D, but they do not seem to be regulated by the major pathways that regulate VEGF-A.

[0365] VEGF-A transcription is potentiated in response to hypoxia and by activated oncogenes. The transcription factors, hypoxia inducible factor-1a (hif-1a) and -2a, are degraded by proteosomes in normoxia and stabilized in hypoxia. This pathway is dependent on the Von Hippel-Lindau gene product. Hif-1a and hif-2 a heterodimerize with the aryl hydrocarbon nuclear translocator in the nucleus and bind the VEGF promoter/enhancer. This is a key pathway expressed in most types of cells. Hypoxia inducibility, in particular, characterizes VEGF-A versus other members of the VEGF family and other angiogenic factors. VEGF transcription in normoxia is activated by many oncogenes, including H-ras and several transmembrane tyrosine kinases, such as the epidermal growth factor receptor and erbB2. These pathways together account for a marked upregulation of VEGF-A in tumors compared to normal tissues and are often of prognostic importance.

[0366] There are three receptors in the VEGF receptor family. They have the common properties of multiple IgG-like extracellular domains and tyrosine kinase activity. The enzyme domains of VEGF receptor 1 (VEGFr1, also known as Flt-1), VEGFr2 (also known as KDR or Flk-1), and VEGFr3 (also known as Flt-4) are divided by an inserted sequence. Endothelial cells also express additional VEGF receptors, Neuropilin-1 and Neuropilin-2. VEGF-A binds to VEGFr1 and VEGFr2 and to Neuropilin-1 and Neuropilin-2. P1GF and VEGF-B bind VEGFr1 and Neuropilin-1. VEGF-C and -D bind VEGFr3 and VEGFr2.

[0367] The VEGF-C/VEGFr3 pathway is important for lymphatic proliferation. VEGFr3 is specifically expressed on lymphatic endothelium. A soluble form of Flt-1 can be detected in peripheral blood and is a high affinity ligand for VEGF. Soluble Flt-I can be used to antagonize VEGF function. VEGFr1 and VEGFr2 are upregulated in tumor and proliferating endothelium, partly by hypoxia and also in response to VEGF-A itself. VEGFr1 and VEGFr2 can interact with multiple downstream signaling pathways via proteins such as PLC-g, Ras, Shc, Nck, PKC and P13-kinase. VEGFr1 is of higher affinity than VEGFr2 and mediates motility and vascular permeability. VEGFr2 is necessary for proliferation.

[0368] VEGF can be detected in both plasma and serum samples of patients, with much higher levels in serum. Platelets release VEGF upon aggregation and may be a major source of VEGF delivery to tumors. Several studies have shown that association of high serum levels of VEGF with poor prognosis in cancer patients may be correlated with an elevated platelet count. Many tumors release cytokines that can stimulate the production of megakaryocytes in the marrow and elevate the platelet count. This can result in an indirect increase of VEGF delivery to tumors.

[0369] VEGF is implicated in several other pathological conditions associated with enhanced angiogenesis. For example, VEGF plays a role in both psoriasis and rheumatoid arthritis. Diabetic retinopathy is associated with high intraocular levels of VEGF. Inhibition of VEGF function may result in infertility by blockade of corpus luteum function. Direct demonstration of the importance of VEGF in tumor growth has been achieved using dominant negative VEGF receptors to block in vivo proliferation, as well as blocking antibodies to VEGF39 or to VEGFr2.

[0370] The use of small interfering nucleic acid molecules targeting VEGF and corresponding receptors and ligands therefore provides a class of novel therapeutic agents that can be used in the diagnosis of and the treatment of cancer, proliferative diseases, or any other disease or condition that responds to modulation of VEGF and/or VEGFr genes.

### EXAMPLES

[0371] The following are non-limiting examples showing the selection, isolation, synthesis and activity of nucleic acids of the instant invention.

### Example 1

### Tandem Synthesis of siNA Constructs

[0372] Exemplary siNA molecules of the invention are synthesized in tandem using a cleavable linker, for example, a succinyl-based linker. Tandem synthesis as described herein is followed by a one-step purification process that provides RNAi molecules in high yield. This approach is highly amenable to siNA synthesis in support of high throughput RNAi screening, and can be readily adapted to multi-column or multi-well synthesis platforms.

[0373] After completing a tandem synthesis of a siNA oligo and its complement in which the 5′-terminal dimethoxytrityl (5′-O-DMT) group remains intact (trityl on synthesis), the oligonucleotides are deprotected as described above. Following deprotection, the siNA sequence strands are allowed to spontaneously hybridize. This hybridization yields a duplex in which one strand has retained the 5′-O-DMT group while the complementary strand comprises a terminal 5′-hydroxyl. The newly formed duplex behaves as a single molecule during routine solid-phase extraction purification (Trityl-On purification) even though only one molecule has a dimethoxytrityl group. Because the strands form a stable duplex, this dimethoxytrityl group (or an equivalent group, such as other trityl groups or other hydrophobic moieties) is all that is required to purify the pair of oligos, for example, by using a C18 cartridge.

[0374] Standard phosphoramidite synthesis chemistry is used up to the point of introducing a tandem linker, such as an inverted deoxy abasic succinate or glyceryl succinate linker (see FIG. 1) or an equivalent cleavable linker. A non-limiting example of linker coupling conditions that can be used includes a hindered base such as diisopropylethylamine (DIPA) and/or DMAP in the presence of an activator reagent such as Bromotripyrrolidinophosphoniumhexaflurorophosphate (PyBrOP). After the linker is coupled, standard synthesis chemistry is utilized to complete synthesis of the second sequence leaving the terminal the 5′-O-DMT intact. Following synthesis, the resulting oligonucleotide is deprotected according to the procedures described herein and quenched with a suitable buffer, for example with 50 mM NaOAc or 1.5M NH₄H₂CO₃.

[0375] Purification of the siNA duplex can be readily accomplished using solid phase extraction, for example using a Waters C18 SepPak 1 g cartridge conditioned with 1 column volume (CV) of acetonitrile, 2 CV H₂O, and 2 CV 50 mM NaOAc. The sample is loaded and then washed with 1 CV H₂O or 50 mM NaOAc. Failure sequences are eluted with 1 CV 14% ACN (Aqueous with 50 mM NaOAc and 50 mM NaCl). The column is then washed, for example with 1 CV H₂O followed by on-column detritylation, for example by passing 1 CV of 1% aqueous trifluoroacetic acid (TFA) over the column, then adding a second CV of 1% aqueous TFA to the column and allowing to stand for approximately 10 minutes. The remaining TFA solution is removed and the column washed with H₂O followed by 1 CV 1M NaCl and additional H₂O. The siNA duplex product is then eluted, for example, using 1 CV 20% aqueous CAN.

[0376] FIG. 2 provides an example of MALDI-TOF mass spectrometry analysis of a purified siNA construct in which each peak corresponds to the calculated mass of an individual siNA strand of the siNA duplex. The same purified siNA provides three peaks when analyzed by capillary gel electrophoresis (CGE), one peak presumably corresponding to the duplex siNA, and two peaks presumably corresponding to the separate siNA sequence strands. Ion exchange HPLC analysis of the same siNA contract only shows a single peak. Testing of the purified siNA construct using a luciferase reporter assay described below demonstrated the same RNAi activity compared to siNA constructs generated from separately synthesized oligonucleotide sequence strands.

### Example 2

### Identification of Potential siNA Target Sites in Any RNA Sequence

[0377] The sequence of an RNA target of interest, such as a viral or human mRNA transcript, is screened for target sites, for example by using a computer folding algorithm. In a non-limiting example, the sequence of a gene or RNA gene transcript derived from a database, such as Genbank, is used to generate siNA targets having complementarity to the target. Such sequences can be obtained from a database, or can be determined experimentally as known in the art. Target sites that are known, for example, those target sites determined to be effective target sites based on studies with other nucleic acid molecules, for example ribozymes or antisense, or those targets known to be associated with a disease or condition such as those sites containing mutations or deletions, can be used to design siNA molecules targeting those sites. Various parameters can be used to determine which sites are the most suitable target sites within the target RNA sequence. These parameters include but are not limited to secondary or tertiary RNA structure, the nucleotide base composition of the target sequence, the degree of homology between various regions of the target sequence, or the relative position of the target sequence within the RNA transcript. Based on these determinations, any number of target sites within the RNA transcript can be chosen to screen siNA molecules for efficacy, for example by using in vitro RNA cleavage assays, cell culture, or animal models. In a non-limiting example, anywhere from 1 to 1000 target sites are chosen within the transcript based on the size of the siNA construct to be used. High throughput screening assays can be developed for screening siNA molecules using methods known in the art, such as with multi-well or multi-plate assays to determine efficient reduction in target gene expression.

### Example 3

[0378] Selection of siNA molecule target sites in a RNA The following non-limiting steps can be used to carry out the selection of siNAs targeting a given gene sequence or transcript.

[0379] 1. The target sequence is parsed in silico into a list of all fragments or subsequences of a particular length, for example 23 nucleotide fragments, contained within the target sequence. This step is typically carried out using a custom Perl script, but commercial sequence analysis programs such as Oligo, MacVector, or the GCG Wisconsin Package can be employed as well.

[0380] 2. In some instances the siNAs correspond to more than one target sequence; such would be the case for example in targeting different transcripts of the same gene, targeting different transcripts of more than one gene, or for targeting both the human gene and an animal homolog. In this case, a subsequence list of a particular length is generated for each of the targets, and then the lists are compared to find matching sequences in each list. The subsequences are then ranked according to the number of target sequences that contain the given subsequence; the goal is to find subsequences that are present in most or all of the target sequences. Alternately, the ranking can identify subsequences that are unique to a target sequence, such as a mutant target sequence. Such an approach would enable the use of siNA to target specifically the mutant sequence and not effect the expression of the normal sequence.

[0381] 3. In some instances the siNA subsequences are absent in one or more sequences while present in the desired target sequence; such would be the case if the siNA targets a gene with a paralogous family member that is to remain untargeted. As in case 2 above, a subsequence list of a particular length is generated for each of the targets, and then the lists are compared to find sequences that are present in the target gene but are absent in the untargeted paralog.

[0382] 4. The ranked siNA subsequences can be further analyzed and ranked according to GC content. A preference can be given to sites containing 30-70% GC, with a further preference to sites containing 40-60% GC.

[0383] 5. The ranked siNA subsequences can be further analyzed and ranked according to self-folding and internal hairpins. Weaker internal folds are preferred; strong hairpin structures are to be avoided.

[0384] 6. The ranked siNA subsequences can be further analyzed and ranked according to whether they have runs of GGG or CCC in the sequence. GGG (or even more Gs) in either strand can make oligonucleotide synthesis problematic and can potentially interfere with RNAi activity, so it is avoided whenever better sequences are available. CCC is searched in the target strand because that will place GGG in the antisense strand.

[0385] 7. The ranked siNA subsequences can be further analyzed and ranked according to whether they have the dinucleotide UU (uridine dinucleotide) on the 3′-end of the sequence, and/or AA on the 5′-end of the sequence (to yield 3′ UU on the antisense sequence). These sequences allow one to design siNA molecules with terminal TT thymidine dinucleotides.

[0386] 8. Four or five target sites are chosen from the ranked list of subsequences as described above. For example, in subsequences having 23 nucleotides, the right 21 nucleotides of each chosen 23-mer subsequence are then designed and synthesized for the upper (sense) strand of the siNA duplex, while the reverse complement of the left 21 nucleotides of each chosen 23-mer subsequence are then designed and synthesized for the lower (antisense) strand of the siNA duplex (see Tables II and III). If terminal TT residues are desired for the sequence (as described in paragraph 7), then the two 3′ terminal nucleotides of both the sense and antisense strands are replaced by TT prior to synthesizing the oligos.

[0387] 9. The siNA molecules are screened in an in vitro, cell culture or animal model system to identify the most active siNA molecule or the most preferred target site within the target RNA sequence.

[0388] In an alternate approach, a pool of siNA constructs specific to a VEGF and/or VEGFr target sequence is used to screen for target sites in cells expressing VEGF and/or VEGFr RNA, such as HUVEC, HMVEC, or A375 cells. The general strategy used in this approach is shown in FIG. 9. A non-limiting example of such is a pool comprising sequences having any of SEQ ID NOS 1-2549. Cells expressing VEGF and/or VEGFr (e.g., HUVEC, HMVEC, or A375 cells) are transfected with the pool of siNA constructs and cells that demonstrate a phenotype associated with VEGF and/or VEGFr inhibition are sorted. The pool of siNA constructs can be expressed from transcription cassettes inserted into appropriate vectors (see for example FIG. 7 and FIG. 8). The siNA from cells demonstrating a positive phenotypic change (e.g., decreased proliferation, decreased VEGF and/or VEGFr mRNA levels or decreased VEGF and/or VEGFr protein expression), are sequenced to determine the most suitable target site(s) within the target VEGF and/or VEGFr RNA sequence.

### Example 4

### VEGF and/or VEGFr Targeted siNA Design

[0389] siNA target sites were chosen by analyzing sequences of the VEGF and/or VEGFr RNA target and optionally prioritizing the target sites on the basis of folding (structure of any given sequence analyzed to determine siNA accessibility to the target), by using a library of siNA molecules as described in Example 3, or alternately by using an in vitro siNA system as described in Example 6 herein. siNA molecules were designed that could bind each target and are optionally individually analyzed by computer folding to assess whether the siNA molecule can interact with the target sequence. Varying the length of the siNA molecules can be chosen to optimize activity. Generally, a sufficient number of complementary nucleotide bases are chosen to bind to, or otherwise interact with, the target RNA, but the degree of complementarity can be modulated to accommodate siNA duplexes or varying length or base composition. By using such methodologies, siNA molecules can be designed to target sites within any known RNA sequence, for example those RNA sequences corresponding to the any gene transcript.

[0390] Chemically modified siNA constructs are designed to provide nuclease stability for systemic administration in vivo and/or improved pharmacokinetic, localization, and delivery properties while preserving the ability to mediate RNAi activity. Chemical modifications as described herein are introduced synthetically using synthetic methods described herein and those generally known in the art. The synthetic siNA constructs are then assayed for nuclease stability in serum and/or cellular/tissue extracts (e.g. liver extracts). The synthetic siNA constructs are also tested in parallel for RNAi activity using an appropriate assay, such as a luciferase reporter assay as described herein or another suitable assay that can quantity RNAi activity. Synthetic siNA constructs that possess both nuclease stability and RNAi activity can be further modified and re-evaluated in stability and activity assays. The chemical modifications of the stabilized active siNA constructs can then be applied to any siNA sequence targeting any chosen RNA and used, for example, in target screening assays to pick lead siNA compounds for therapeutic development (see for example FIG. 11).

### Example 5

### Chemical Synthesis and Purification of siNA

[0391] siNA molecules can be designed to interact with various sites in the RNA message, for example, target sequences within the RNA sequences described herein. The sequence of one strand of the siNA molecule(s) is complementary to the target site sequences described above. The siNA molecules can be chemically synthesized using methods described herein. Inactive siNA molecules that are used as control sequences can be synthesized by scrambling the sequence of the siNA molecules such that it is not complementary to the target sequence. Generally, siNA constructs can by synthesized using solid phase oligonucleotide synthesis methods as described herein (see for example Usman et al., U.S. Pat. Nos. 5,804,683; 5,831,071; 5,998,203; 6,117,657; 6,353,098; 6,362,323; 6,437,117; 6,469,158; Scaringe et al., U.S. Pat. Nos. 6,111,086; 6,008,400; 6,111,086 all incorporated by reference herein in their entirety).

[0392] In a non-limiting example, RNA oligonucleotides are synthesized in a stepwise fashion using the phosphoramidite chemistry as is known in the art. Standard phosphoramidite chemistry involves the use of nucleosides comprising any of 5′-O-dimethoxytrityl, 2′-O-tert-butyldimethylsilyl, 3′-O-2-Cyanoethyl N,N-diisopropylphos-phoroamidite groups, and exocyclic amine protecting groups (e.g. N6-benzoyl adenosine, N4 acetyl cytidine, and N2-isobutyryl guanosine). Alternately, 2′-O-Silyl Ethers can be used in conjunction with acid-labile 2′-O-orthoester protecting groups in the synthesis of RNA as described by Scaringe supra. Differing 2′ chemistries can require different protecting groups, for example 2′-deoxy-2′-amino nucleosides can utilize N-phthaloyl protection as described by Usman et al., U.S. Pat. No. 5,631,360, incorporated by reference herein in its entirety).

[0393] During solid phase synthesis, each nucleotide is added sequentially (3′- to 5′-direction) to the solid support-bound oligonucleotide. The first nucleoside at the 3′-end of the chain is covalently attached to a solid support (e.g., controlled pore glass or polystyrene) using various linkers. The nucleotide precursor, a ribonucleoside phosphoramidite, and activator are combined resulting in the coupling of the second nucleoside phosphoramidite onto the 5′-end of the first nucleoside. The support is then washed and any unreacted 5′-hydroxyl groups are capped with a capping reagent such as acetic anhydride to yield inactive 5′-acetyl moieties. The trivalent phosphorus linkage is then oxidized to a more stable phosphate linkage. At the end of the nucleotide addition cycle, the 5′-O-protecting group is cleaved under suitable conditions (e.g., acidic conditions for trityl-based groups and Fluoride for silyl-based groups). The cycle is repeated for each subsequent nucleotide.

[0394] Modification of synthesis conditions can be used to optimize coupling efficiency, for example by using differing coupling times, differing reagent/phosphoramidite concentrations, differing contact times, differing solid supports and solid support linker chemistries depending on the particular chemical composition of the siNA to be synthesized. Deprotection and purification of the siNA can be performed as is generally described in Deprotection and purification of the siNA can be performed as is generally described in Usman et al., U.S. Pat. No. 5,831,071, U.S. Pat. No. 6,353,098, U.S. Pat. No. 6,437,117, and Bellon et al., U.S. Pat. No. 6,054,576, U.S. Pat. No. 6,162,909, U.S. Pat. No. 6,303,773, or Scaringe supra, incorporated by reference herein in their entireties. Additionally, deprotection conditions can be modified to provide the best possible yield and purity of siNA constructs. For example, applicant has observed that oligonucleotides comprising 2′-deoxy-2′-fluoro nucleotides can degrade under inappropriate deprotection conditions. Such oligonucleotides are deprotected using aqueous methylamine at about 35° C. for 30 minutes. If the 2′-deoxy-2′-fluoro containing oligonucleotide also comprises ribonucleotides, after deprotection with aqueous methylamine at about 35° C. for 30 minutes, TEA-HF is added and the reaction maintained at about 65° C. for an additional 15 minutes.

### Example 6

### RNAi In Vitro Assay to Assess siNA Activity

[0395] An in vitro assay that recapitulates RNAi in a cell-free system is used to evaluate siNA constructs targeting VEGF and/or VEGFr RNA targets. The assay comprises the system described by Tuschl et al., 1999, Genes and Development, 13, 3191-3197 and Zamore et al., 2000, Cell, 101, 25-33 adapted for use with VEGF and/or VEGFr target RNA. A Drosophila extract derived from syncytial blastoderm is used to reconstitute RNAi activity in vitro. Target RNA is generated via in vitro transcription from an appropriate VEGF and/or VEGFr expressing plasmid using T7 RNA polymerase or via chemical synthesis as described herein. Sense and antisense siNA strands (for example 20 uM each) are annealed by incubation in buffer (such as 100 mM potassium acetate, 30 mM HEPES-KOH, pH 7.4, 2 mM magnesium acetate) for 1 minute at 90° C. followed by 1 hour at 37° C., then diluted in lysis buffer (for example 100 mM potassium acetate, 30 mM HEPES-KOH at pH 7.4, 2 mM magnesium acetate). Annealing can be monitored by gel electrophoresis on an agarose gel in TBE buffer and stained with ethidium bromide. The Drosophila lysate is prepared using zero to two-hour-old embryos from Oregon R flies collected on yeasted molasses agar that are dechorionated and lysed. The lysate is centrifuged and the supernatant isolated. The assay comprises a reaction mixture containing 50% lysate [vol/vol], RNA (10-50 pM final concentration), and 10% [vol/vol] lysis buffer containing siNA (10 μM final concentration). The reaction mixture also contains 10 mM creatine phosphate, 10 ug.ml creatine phosphokinase, 100 um GTP, 100 uM UTP, 100 uM CTP, 500 uM ATP, 5 mM DTT, 0.1 U/uL RNasin (Promega), and 100 uM of each amino acid. The final concentration of potassium acetate is adjusted to 100 mM. The reactions are pre-assembled on ice and preincubated at 25° C. for 10 minutes before adding RNA, then incubated at 25° C. for an additional 60 minutes. Reactions are quenched with 4 volumes of 1.25×Passive Lysis Buffer (Promega). Target RNA cleavage is assayed by RT-PCR analysis or other methods known in the art and are compared to control reactions in which siNA is omitted from the reaction.

[0396] Alternately, internally-labeled target RNA for the assay is prepared by in vitro transcription in the presence of [alpha-³²P] CTP, passed over a G 50 Sephadex column by spin chromatography and used as target RNA without further purification. Optionally, target RNA is 5′-³²P-end labeled using T4 polynucleotide kinase enzyme. Assays are performed as described above and target RNA and the specific RNA cleavage products generated by RNAi are visualized on an autoradiograph of a gel. The percentage of cleavage is determined by Phosphor Imager® quantitation of bands representing intact control RNA or RNA from control reactions without siNA and the cleavage products generated by the assay.

[0397] In one embodiment, this assay is used to determine target sites the VEGF and/or VEGFr RNA target for siNA mediated RNAi cleavage, wherein a plurality of siNA constructs are screened for RNAi mediated cleavage of the VEGF and/or VEGFr RNA target, for example, by analyzing the assay reaction by electrophoresis of labeled target RNA, or by northern blotting, as well as by other methodology well known in the art.

### Example 7

### Nucleic Acid Inhibition of VEGF and/or VEGFr Target RNA In Vivo

[0398] siNA molecules targeted to the human VEGF and/or VEGFr RNA are designed and synthesized as described above. These nucleic acid molecules can be tested for cleavage activity in vivo, for example, using the following procedure. The target sequences and the nucleotide location within the VEGF and/or VEGFr RNA are given in Table II and III.

[0399] Two formats are used to test the efficacy of siNAs targeting VEGF and/or VEGFr. First, the reagents are tested in cell culture using, for example, HUVEC, HMVEC, or A375 cells to determine the extent of RNA and protein inhibition. siNA reagents (e.g.; see Tables II and III) are selected against the VEGF and/or VEGFr target as described herein. RNA inhibition is measured after delivery of these reagents by a suitable transfection agent to, for example, HUVEC, HMVEC, or A375 cells. Relative amounts of target RNA are measured versus actin using real-time PCR monitoring of amplification (eg., ABI 7700 Taqman®). A comparison is made to a mixture of oligonucleotide sequences made to unrelated targets or to a randomized siNA control with the same overall length and chemistry, but randomly substituted at each position. Primary and secondary lead reagents are chosen for the target and optimization performed. After an optimal transfection agent concentration is chosen, a RNA time-course of inhibition is performed with the lead siNA molecule. In addition, a cell-plating format can be used to determine RNA inhibition.

[0400] Delivery of siNA to Cells

[0401] Cells (e.g., HUVEC, HMVEC, or A375 cells) are seeded, for example, at 1×10⁵ cells per well of a six-well dish in EGM-2 (BioWhittaker) the day before transfection. siNA (final concentration, for example 20 nM) and cationic lipid (e.g., final concentration 2 μg/ml) are complexed in EGM basal media (Biowhittaker) at 37° C. for 30 minutes in polystyrene tubes. Following vortexing, the complexed siNA is added to each well and incubated for the times indicated. For initial optimization experiments, cells are seeded, for example, at 1×10³ in 96 well plates and siNA complex added as described. Efficiency of delivery of siNA to cells is determined using a fluorescent siNA complexed with lipid. Cells in 6-well dishes are incubated with siNA for 24 hours, rinsed with PBS and fixed in 2% paraformaldehyde for 15 minutes at room temperature. Uptake of siNA is visualized using a fluorescent microscope.

[0402] Taqman and Lightcycler Quantification of mRNA

[0403] Total RNA is prepared from cells following siNA delivery, for example, using Qiagen RNA purification kits for 6-well or Rneasy extraction kits for 96-well assays. For Taqman analysis, dual-labeled probes are synthesized with the reporter dye, FAM or JOE, covalently linked at the 5′-end and the quencher dye TAMRA conjugated to the 3′-end. One-step RT-PCR amplifications are performed on, for example, an ABI PRISM 7700 Sequence Detector using 50 μl reactions consisting of 10 μl total RNA, 100 nM forward primer, 900 nM reverse primer, 100 nM probe, 1× TaqMan PCR reaction buffer (PE-Applied Biosystems), 5.5 mM MgCl₂, 300 μM each dATP, dCTP, dGTP, and dTTP, 10U RNase Inhibitor (Promega), 1.25U AmpliTaq Gold (PE-Applied Biosystems) and 10U M-MLV Reverse Transcriptase (Promega). The thermal cycling conditions can consist of 30 minutes at 48° C., 10 minutes at 95° C., followed by 40 cycles of 15 seconds at 95° C. and 1 minute at 60° C. Quantitation of mRNA levels is determined relative to standards generated from serially diluted total cellular RNA (300, 100, 33, 11 ng/rxn) and normalizing to β-actin or GAPDH mRNA in parallel TaqMan reactions. For each gene of interest an upper and lower primer and a fluorescently labeled probe are designed. Real time incorporation of SYBR Green I dye into a specific PCR product can be measured in glass capillary tubes using a lightcycler. A standard curve is generated for each primer pair using control cRNA. Values are represented as relative expression to GAPDH in each sample.

[0404] Western Blotting

[0405] Nuclear extracts can be prepared using a standard micro preparation technique (see for example Andrews and Faller, 1991, Nucleic Acids Research, 19, 2499). Protein extracts from supernatants are prepared, for example using TCA precipitation. An equal volume of 20% TCA is added to the cell supernatant, incubated on ice for 1 hour and pelleted by centrifugation for 5 minutes. Pellets are washed in acetone, dried and resuspended in water. Cellular protein extracts are run on a 10% Bis-Tris NuPage (nuclear extracts) or 4-12% Tris-Glycine (supernatant extracts) polyacrylamide gel and transferred onto nitro-cellulose membranes. Non-specific binding can be blocked by incubation, for example, with 5% non-fat milk for 1 hour followed by primary antibody for 16 hour at 4° C. Following washes, the secondary antibody is applied, for example (1:10,000 dilution) for 1 hour at room temperature and the signal detected with SuperSignal reagent (Pierce).

### Example 8

### Animal Models Useful to Evaluate the Down-Regulation of VEGF and/or VEGFr Gene Expression

[0406] There are several animal models in which the anti-angiogenesis effect of nucleic acids of the present invention, such as siRNA, directed against VEGF, VEGFr1, VEGFr2 and/or VEGFr3 mRNAs can be tested. Typically a corneal model has been used to study angiogenesis in rat and rabbit since recruitment of vessels can easily be followed in this normally avascular tissue (Pandey et al., 1995 Science 268: 567-569). In these models, a small Teflon or Hydron disk pretreated with an angiogenesis factor (e.g. bFGF or VEGF) is inserted into a pocket surgically created in the cornea. Angiogenesis is monitored 3 to 5 days later. siRNA directed against VEGF, VEGFr1, VEGFr2 and/or VEGFr3 mRNAs are delivered in the disk as well, or dropwise to the eye over the time course of the experiment. In another eye model, hypoxia has been shown to cause both increased expression of VEGF and neovascularization in the retina (Pierce et al., 1995 Proc. Natl. Acad. Sci. USA. 92: 905-909; Shweiki et al., 1992 J. Clin. Invest. 91: 2235-2243).

[0407] In human glioblastomas, it has been shown that VEGF is at least partially responsible for tumor angiogenesis (Plate et al., 1992 Nature 359, 845). Animal models have been developed in which glioblastoma cells are implanted subcutaneously into nude mice and the progress of tumor growth and angiogenesism is studied (Kim et al., 1993 supra; Millauer et al., 1994 supra).

[0408] Another animal model that addresses neovascularization involves Matrigel, an extract of basement membrane that becomes a solid gel when injected subcutaneously (Passaniti et al., 1992 Lab. Invest. 67: 519-528). When the Matrigel is supplemented with angiogenesis factors such as VEGF, vessels grow into the Matrigel over a period of 3 to 5 days and angiogenesis can be assessed. Again, nucleic acids directed against VEGFr mRNAs are delivered in the Matrigel.

[0409] Several animal models exist for screening of anti-angiogenic agents. These include corneal vessel formation following corneal injury (Burger et al., 1985 Cornea 4: 35-41; Lepri, et al., 1994 J Ocular Pharmacol. 10: 273-280; Ormerod et al., 1990 Am. J. Pathol. 137: 1243-1252) or intracorneal growth factor implant (Grant et al., 1993 Diabetologia 36: 282-291; Pandey et al. 1995 supra; Zieche et al., 1992 Lab. Invest. 67: 711-715), vessel growth into Matrigel matrix containing growth factors (Passaniti et al., 1992 supra), female reproductive organ neovascularization following hormonal manipulation (Shweiki et al., 1993 Clin. Invest. 91: 2235-2243), several models involving inhibition of tumor growth in highly vascularized solid tumors (O'Reilly et al., 1994 Cell 79: 315-328; Senger et al., 1993 Cancer and Metas. Rev. 12: 303-324; Takahasi et al., 1994 Cancer Res. 54: 4233-4237; Kim et al., 1993 supra), and transient hypoxia-induced neovascularization in the mouse retina (Pierce et al., 1995 Proc. Natl. Acad. Sci. USA. 92: 905-909). Other model systems to study tumor angiogenesis are reviewed by Folkman, 1985 Adv. Cancer. Res. 43, 175.

[0410] Ocular Models of Angiogenesis

[0411] The cornea model, described in Pandey et al. supra, is the most common and well characterized model for screening anti-angiogenic agent efficacy. This model involves an avascular tissue into which vessels are recruited by a stimulating agent (growth factor, thermal or alkalai burn, endotoxin). The corneal model utilizes the intrastromal corneal implantation of a Teflon pellet soaked in a VEGF-Hydron solution to recruit blood vessels toward the pellet, which can be quantitated using standard microscopic and image analysis techniques. To evaluate their anti-angiogenic efficacy, nucleic acids are applied topically to the eye or bound within Hydron on the Teflon pellet itself. This avascular cornea as well as the Matrigel (see below) provide for low background assays. While the corneal model has been performed extensively in the rabbit, studies in the rat have also been conducted.

[0412] The mouse model (Passaniti et al., supra) is a non-tissue model that utilizes Matrigel, an extract of basement membrane (Kleinman et al., 1986) or Millipore® filter disk, which can be impregnated with growth factors and anti-angiogenic agents in a liquid form prior to injection. Upon subcutaneous administration at body temperature, the Matrigel or Millipore® filter disk forms a solid implant. VEGF embedded in the Matrigel or Millipore® filter disk is used to recruit vessels within the matrix of the Matrigel or Millipore® filter disk which can be processed histologically for endothelial cell specific vWF (factor VIII antigen) immunohistochemistry, Trichrome-Masson stain, or hemoglobin content. Like the cornea, the Matrigel or Millipore® filter disk is avascular; however, it is not tissue. In the Matrigel or Millipore® filter disk model, nucleic acids are administered within the matrix of the Matrigel or Millipore® filter disk to test their anti-angiogenic efficacy. Thus, delivery issues in this model, as with delivery of nucleic acids by Hydron-coated Teflon pellets in the rat cornea model, may be less problematic due to the homogeneous presence of the nucleic acid within the respective matrix.

[0413] Additionally, siNA molecules of the invention targeting VEGF and/or VEGFr (e.g. VEGFR1, VEGFR2, and/or VEGFR3) can be assesed for activity transgenic mice to determine whether modulation of VEGF and/or VEGFr can inhibit optic neovasculariation. Animal models of choroidal neovascularization are described in, for example, Mori et al., 2001, Journal of Cellular Physiology, 188, 253; Mori et al., 2001, American Journal of Pathology, 159, 313; Ohno-Matsui et al., 2002, American Journal of Pathology, 160, 711; and Kwak et al., 2000, Investigative Ophthalmology & Visual Science, 41, 3158. VEGF plays a central role in causing retinal neovascularization. Increased expression of VEGFR2 in retinal photoreceptors of transgenic mice stimulates neovascularization within the retina, and a blockade of VEGFR2 signaling has been shown to inhibit retinal choroidal neovascularization (CNV) (Mori et al., 2001, J. Cell. Physiol., 188, 253).

[0414] CNV is laser induced in, for example, adult C57BL/6 mice. The mice are also given an intravitreous, periocular or a subretinal injection of VEGF and/or VEGFr (e.g., VEGFR2) siNA in each eye. Intravitreous injections are made using a Harvard pump microinjection apparatus and pulled glass micropipets. Then a micropipette is passed through the sclera just behind the limbus into the vitreous cavity. The subretinal injections are made using a condensing lens system on a dissecting microscope. The pipet tip is then passed through the sclera posterior to the limbus and positioned above the retina. Five days after the injection of the vector the mice are anesthetized with ketamine hydrochloride (100 mg/kg body weight), 1% tropicamide is also used to dilate the pupil, and a diode laser photocoagulation is used to rupture Bruch's membrane at three locations in each eye. A slit lamp delivery system and a hand-held cover slide are used for laser photocoagulation. Burns are made in the 9, 12, and 3 o'clock positions 2-3 disc diameters from the optic nerve (Mori et al., supra).

[0415] The mice typically develop subretinal neovasculariation due to the expression of VEGF in photoreceptors beginning at prenatal day 7. At prenatal day 21, the mice are anesthetized and perfused with 1 ml of phosphate-buffered saline containing 50 mg/ml of fluorescein-labeled dextran. Then the eyes are removed and placed for 1 hour in a 10% phosphate-buffered formalin. The retinas are removed and examined by fluorescence microscopy (Mori et al., supra).

[0416] Fourteen days after the laser induced rupture of Bruch's membrane, the eyes that received intravitreous and subretinal injection of siNA are evaluated for smaller appearing areas of CNV, while control eyes are evaluated for large areas of CNV. The eyes that receive intravitreous injections or a subretinal injection of siNA are also evaluated for fewer areas of neovasculariation on the outer surface of the retina and potential abortive sprouts from deep retinal capillaries that do not reach the retinal surface compared to eyes that did not receive an injection of siNA.

[0417] Tumor Models of Angiogenesis

[0418] Use of Murine Models

[0419] For a typical systemic study involving 10 mice (20 g each) per dose group, 5 doses (1, 3, 10, 30 and 100 mg/kg daily over 14 days continuous administration), approximately 400 mg of siRNA, formulated in saline is used. A similar study in young adult rats (200 g) requires over 4 g. Parallel pharmacokinetic studies involve the use of similar quantities of siRNA further justifying the use of murine models.

[0420] Lewis Lung Carcinoma and B-16 Melanoma Murine Models

[0421] Identifying a common animal model for systemic efficacy testing of nucleic acids is an efficient way of screening siNA for systemic efficacy.

[0422] The Lewis lung carcinoma and B-16 murine melanoma models are well accepted models of primary and metastatic cancer and are used for initial screening of anti-cancer agents. These murine models are not dependent upon the use of immunodeficient mice, are relatively inexpensive, and minimize housing concerns. Both the Lewis lung and B-16 melanoma models involve subcutaneous implantation of approximately 10⁶ tumor cells from metastatically aggressive tumor cell lines (Lewis lung lines 3LL or D122, LLc-LN7; B-16-BL6 melanoma) in C57BL/6J mice. Alternatively, the Lewis lung model can be produced by the surgical implantation of tumor spheres (approximately 0.8 mm in diameter). Metastasis also can be modeled by injecting the tumor cells directly intravenously. In the Lewis lung model, microscopic metastases can be observed approximately 14 days following implantation with quantifiable macroscopic metastatic tumors developing within 21-25 days. The B-16 melanoma exhibits a similar time course with tumor neovascularization beginning 4 days following implantation. Since both primary and metastatic tumors exist in these models after 21-25 days in the same animal, multiple measurements can be taken as indices of efficacy. Primary tumor volume and growth latency as well as the number of micro- and macroscopic metastatic lung foci or number of animals exhibiting metastases can be quantitated. The percent increase in lifespan can also be measured. Thus, these models provide suitable primary efficacy assays for screening systemically administered siRNA nucleic acids and siRNA nucleic acid formulations.

[0423] In the Lewis lung and B-16 melanoma models, systemic pharmacotherapy with a wide variety of agents usually begins 1-7 days following tumor implantation/inoculation with either continuous or multiple administration regimens. Concurrent pharmacokinetic studies can be performed to determine whether sufficient tissue levels of siRNA can be achieved for pharmacodynamic effect to be expected. Furthermore, primary tumors and secondary lung metastases can be removed and subjected to a variety of in vitro studies (i.e. target RNA reduction).

[0424] In addition, animal models are useful in screening compounds, eg. siNA molecules, for efficacy in treating renal failure, such as a result of autosomal dominant polycystic kidney disease (ADPKD). The Han:SPRD rat model, mice with a targeted mutation in the Pkd2 gene and congenital polycystic kidney (cpk) mice, closely resemble human ADPKD and provide animal models to evaluate the therapeutic effect of siRNA constructs that have the potential to interfere with one or more of the pathogenic elements of ADPKD mediated renal failure, such as angiogenesis. Angiogenesis may be necessary in the progression of ADPKD for growth of cyst cells as well as increased vascular permeability promoting fluid secretion into cysts. Proliferation of cystic epithelium is also a feature of ADPKD because cyst cells in culture produce soluble vascular endothelial growth factor (VEGF). VEGFr1 has also been detected in epithelial cells of cystic tubules but not in endothelial cells in the vasculature of cystic kidneys or normal kidneys. VEGFr2 expression is increased in endothelial cells of cyst vessels and in endothelial cells during renal ischemia-reperfusion. It is proposed that inhibition of VEGF receptors with anti-VEGFr1 and anti-VEGFr2 siRNA molecules would attenuate cyst formation, renal failure and mortality in ADPKD. Anti-VEGFr2 siRNA molecules would therefore be designed to inhibit angiogenesis involved in cyst formation. As VEGFr1 is present in cystic epithelium and not in vascular endothelium of cysts, it is proposed that anti-VEGFr1 siRNA molecules would attenuate cystic epithelial cell proliferation and apoptosis which would in turn lead to less cyst formation. Further, it is proposed that VEGF produced by cystic epithelial cells is one of the stimuli for angiogenesis as well as epithelial cell proliferation and apoptosis. The use of Han:SPRD rats (see for example Kaspareit-Rittinghausen et al., 1991, Am. J Pathol. 139, 693-696), mice with a targeted mutation in the Pkd2 gene (Pkd2 −/− mice, see for example Wu et al., 2000, Nat. Genet. 24, 75-78) and cpk mice (see for example Woo et al., 1994, Nature, 368, 750-753) all provide animal models to study the efficacy of siRNA molecules of the invention against VEGFr1 and VEGFr2 mediated renal failure.

[0425] VEGF, VEGFr1 VGFR2 and/or VEGFr3 protein levels can be measured clinically or experimentally by FACS analysis. VEGF, VEGFr1 VGFR2 and/or VEGFr3 encoded mRNA levels are assessed by Northern analysis, RNase-protection, primer extension analysis and/or quantitative RT-PCR. siRNA nucleic acids that block VEGF, VEGFr1 VGFR2 and/or VEGFr3 protein encoding mRNAs and therefore result in decreased levels of VEGF, VEGFr1 VGFR2 and/or VEGFr3 activity by more than 20% in vitro can be identified.

### Example 9

### RNAi Mediated Inhibition of VEGFr Expression in Cell Culture

[0426] Inhibition of VEGFr1 RNA Expression Using siNA Targeting VEGFr1 RNA

[0427] siNA constructs (Table III) are tested for efficacy in reducing VEGF and/or VEGFr RNA expression in, for example, HUVEC, HMVEC, or A375 cells. Cells are plated approximately 24 hours before transfection in 96-well plates at 5,000-7,500 cells/well, 100 μl/well, such that at the time of transfection cells are 70-90% confluent. For transfection, annealed siNAs are mixed with the transfection reagent (Lipofectamine 2000, Invitrogen) in a volume of 50 μl/well and incubated for 20 min. at room temperature. The siNA transfection mixtures are added to cells to give a final siNA concentration of 25 nM in a volume of 150 μl. Each siNA transfection mixture is added to 3 wells for triplicate siNA treatments. Cells are incubated at 37° for 24 h in the continued presence of the siNA transfection mixture. At 24 h, RNA is prepared from each well of treated cells. The supernatants with the transfection mixtures are first removed and discarded, then the cells are lysed and RNA prepared from each well. Target gene expression following treatment is evaluated by RT-PCR for the target gene and for a control gene (36B4, an RNA polymerase subunit) for normalization. The triplicate data is averaged and the standard deviations determined for each treatment. Normalized data are graphed and the percent reduction of target mRNA by active siNAs in comparison to their respective inverted control siNAs is determined.

[0428] FIG. 13 shows a non-limiting example of reduction of VEGFr1 mRNA in A375 cells mediated by chemically-modified siNAs that target VEGFr1 mRNA. A549 cells were transfected with 0.25 ug/well of lipid complexed with 25 nM siNA. A screen of siNA constructs (Stabilization “Stab” chemistries are shown in Table IV, constructs are referred to by RPI number, see Table III) comprising Stab 4/5 chemistry (Sirna/RPI 31190/31193), Stab 1/2 chemistry (Sirna/RPI 31183/31186 and Sirna/RPI 31184/31187), and unmodified RNA (Sirna/RPI 30075/30076) were compared to untreated cells, matched chemistry inverted control siNA constructs (Sirna/RPI 31208/31211, Sirna/RPI 31201/31204, Sirna/RPI 31202/31205, and Sirna/RPI 30077/30078), scrambled siNA control constructs (Scram1 and Scram2), and cells transfected with lipid alone (transfection control). As shown in the figure, all of the siNA constructs significantly reduce VEGFr1 RNA expression. Additional stabilization chemistries as described in Table IV are similarly assayed for activity. These siNA constructs are compared to appropriate matched chemistry inverted controls. In addition, the siNA constructs are also compared to untreated cells, cells transfected with lipid and scrambled siNA constructs, and cells transfected with lipid alone (transfection control).

[0429] Inhibition of VEGFr1 and VEGFr2 RNA Expression Using siNA Targeting VEGFr1 and VEGFr2 Homologous RNA Sequences

[0430] VEGFr1 and VEGFr2 RNA levels were assessed in HAEC cells 24 hours after treatment with siNA molecules targeting sequences having VEGFr1 and VEGFr2 homology. HAEC cells were transfected with 1.5 ug/well of lipid complexed with 25 nM siNA. Activity of the siNA molecules is shown compared to matched chemistry inverted siNA controls, untreated cells, and cells treated with lipid only (transfection control). siNA molecules and controls are referred to by compound numbers (sense/antisense), see Table III for sequences. As shown in FIGS. 22A and B, siNA constructs that target both VEGFr1 and VEGFr2 sequences demonstrate potent efficacy in inhibiting VEGFr1 expression in cell cuture experiments. As shown in FIGS. 23A and B, siNA constructs that target both VEGFr1 and VEGFr2 sequences demonstrate potent efficacy in inhibiting VEGFr2 expression in cell cuture experiments.

### Example 10

### siNA-Mediated Inhibition of Angiogenesis In Vivo

[0431] Evaluation of siNA Molecules in the Rat Cornea Model of VEGF Induced Angiogenesis

[0432] The purpose of this study was to assess the anti-angiogenic activity of siNA targeted against VEGFR1, using the rat cornea model of VEGF induced angiogenesis. The siNA molecules referred to in FIG. 12 have matched inverted controls which are inactive since they are not able to interact with the RNA target. The siNA molecules and VEGF were co-delivered using the filter disk method. Nitrocellulose filter disks (Millipore®) of 0.057 diameter were immersed in appropriate solutions and were surgically implanted in rat cornea as described by Pandey et al., supra.

[0433] The stimulus for angiogenesis in this study was the treatment of the filter disk with 30 μM VEGF, which is implanted within the cornea's stroma. This dose yields reproducible neovascularization stemming from the pericorneal vascular plexus growing toward the disk in a dose-response study 5 days following implant. Filter disks treated only with the vehicle for VEGF show no angiogenic response. The siNA were co-adminstered with VEGF on a disk in three different siNA concentrations. One concern with the simultaneous administration is that the siNA would not be able to inhibit angiogenesis since VEGF receptors can be stimulated. However, Applicant has observed that in low VEGF doses, the neovascular response reverts to normal suggesting that the VEGF stimulus is essential for maintaining the angiogenic response. Blocking the production of VEGF receptors using simultaneous administration of anti-VEGF-R mRNA siNA could attenuate the normal neovascularization induced by the filter disk treated with VEGF.

[0434] Materials and Methods:

[0435] Test Compounds and Controls

[0436] R&D Systems VEGF, carrier free at 75 μM in 82 mM Tris-Cl, pH 6.9
[0437] Active siNA constructs and inverted controls (Table III)
   Animals
[0439] Harlan Sprague-Dawley Rats, Approximately 225-250 g
[0440] 45 males, 5 animals per group.
   Husbandry

[0442] Animals are housed in groups of two. Feed, water, temperature and humidity are determined according to Pharmacology Testing Facility performance standards (SOP's) which are in accordance with the 1996 Guide for the Care and Use of Laboratory Animals (NRC). Animals are acclimated to the facility for at least 7 days prior to experimentation. During this time, animals are observed for overall health and sentinels are bled for baseline serology.

[0443] Experimental Groups

[0444] Each solution (VEGF and siNAs) was prepared as a 1× solution for final concentrations shown in the experimental groups described in Table III.

[0445] siNA Annealing Conditions

[0446] siNA sense and antisense strands are annealed for 1 minute in H₂O at 1.67 mg/mL/strand followed by a 1 hour incubation at 37° C. producing 3.34 mg/mL of duplexed siNA. For the 20 μg/eye treatment, 6 μLs of the 3.34 mg/mL duplex is injected into the eye (see below). The 3.34 mg/mL duplex siNA can then be serially diluted for dose response assays.

[0447] Preparation of VEGF Filter Disk

[0448] For corneal implantation, 0.57 mm diameter nitrocellulose disks, prepared from 0.45 μm pore diameter nitrocellulose filter membranes (Millipore Corporation), were soaked for 30 min in 1 μL of 75 μM VEGF in 82 mM Tris HCl (pH 6.9) in covered petri dishes on ice. Filter disks soaked only with the vehicle for VEGF (83 mM Tris-Cl pH 6.9) elicit no angiogenic response.

[0449] Corneal Surgery

[0450] The rat corneal model used in this study was a modified from Koch et al. Supra and Pandey et al., supra. Briefly, corneas were irrigated with 0.5% povidone iodine solution followed by normal saline and two drops of 2% lidocaine. Under a dissecting microscope (Leica MZ-6), a stromal pocket was created and a presoaked filter disk (see above) was inserted into the pocket such that its edge was 1 mm from the corneal limbus.

[0451] Intraconjunctival Injection of Test Solutions

[0452] Immediately after disk insertion, the tip of a 40-50 μm OD injector (constructed in our laboratory) was inserted within the conjunctival tissue 1 mm away from the edge of the corneal limbus that was directly adjacent to the VEGF-soaked filter disk. Six hundred nanoliters of test solution (siNA, inverted control or sterile water vehicle) were dispensed at a rate of 1.2 μL/min using a syringe pump (Kd Scientific). The injector was then removed, serially rinsed in 70% ethanol and sterile water and immersed in sterile water between each injection. Once the test solution was injected, closure of the eyelid was maintained using microaneurism clips until the animal began to recover gross motor activity. Following treatment, animals were warmed on a heating pad at 37° C.

[0453] Quantitation of Angiogenic Response

[0454] Five days after disk implantation, animals were euthanized following administration of 0.4 mg/kg atropine and corneas were digitally imaged. The neovascular surface area (NSA, expressed in pixels) was measured postmortem from blood-filled corneal vessels using computerized morphometry (Image Pro Plus, Media Cybernetics, v2.0). The individual mean NSA was determined in triplicate from three regions of identical size in the area of maximal neovascularization between the filter disk and the limbus. The number of pixels corresponding to the blood-filled corneal vessels in these regions was summated to produce an index of NSA. A group mean NSA was then calculated. Data from each treatment group were normalized to VEGF/siNA vehicle-treated control NSA and finally expressed as percent inhibition of VEGF-induced angiogenesis.

[0455] Statistics

[0456] After determining the normality of treatment group means, group mean percent inhibition of VEGF-induced angiogenesis was subjected to a one-way analysis of variance. This was followed by two post-hoc tests for significance including Dunnett's (comparison to VEGF control) and Tukey-Kramer (all other group mean comparisons) at alpha=0.05. Statistical analyses were performed using JMP v.3.1.6 (SAS Institute).

[0457] Results of the study are graphically represented in FIGS. 12 and 16. As shown in FIG. 12, VEGFr1 site 4229 active siNA (Sirna/RPI 29695/29699) at three concentrations was effective at inhibiting angiogenesis compared to the inverted siNA control (Sirna/RPI 29983/29984) and the VEGF control. A chemically modified version of the VEGFr1 site 4229 active siNA comprising a sense strand having 2′-deoxy-2′-fluoro pyrimidines and ribo purines with 5′ and 3′ terminal inverted deoxyabasic residues and an antisense strand having having 2′-deoxy-2′-fluoro pyrimidines and ribo purines with a terminal 3′-phosphorothioate internucleotide linkage (Sirna/RPI 30196/30416), showed similar inhibition. Furthermore, VEGFr1 site 349 active siNA having “Stab 9/10” chemistry (Compound No. 31270/31273) was tested for inhibition of VEGF-induced angiogenesis at three different concentrations (2.0 ug, 1.0 ug, and 0.1 ug dose response) as compared to a matched chemistry inverted control siNA construct (Compound No. 31276/31279) at each concentration and a VEGF control in which no siNA was administered. As shown in FIG. 16, the active siNA construct having “Stab 9/10” chemistry (Compound No. 31270/31273) is highly effective in inhibiting VEGF-induced angiogenesis in the rat corneal model compared to the matched chemistry inverted control siNA at concentrations from 0.1 ug to 2.0 ug. These results demonstrate that siNA molecules having different chemically modified compositions, such as the modifications described herein, are capable of significantly inhibiting angiogenesis in vivo.

[0458] Evaluation of siNA Molecules Targeting Homologous VEGFr1 and VEGFr2 Sequences in the Rat Cornea Model of VEGF Induced Angiogenesis

[0459] The above model was utilized to evaluate the efficacy of siNA molecules targeting homologous VEGFr1 and VEGFr2 sequences in inhibiting VEGF induced ocular angiogenesis. Test compounds and controls are referred to in Table VII, sequences are shown in Table II. The siNAs or other test articles were administered by subconjunctival injection after VEGF disk implantation. The siNAs were preannealed prior to administration. Subconjuctival injections were performed using polyimide coated fused silica glass catheter tubing (OD=148 μm, ID=74 μm). This tubing was inserted into a borosilicate glass micropipette that was pulled to a fine point of approximately 40-50 microns OD using a Flaming/Brown Micropipette Puller (Model P-87, Sutter Instrument Co.). The micropipette was inserted into the pericorneal conjunctiva in the vicinity of the implanted filter disc and a volume of 1.2 μL was delivered over 15 seconds using a Hamilton Gastight syringe (25 μL) and a syringe pump. The rat eye was prepared by trimming the whiskers around the eye and washing the eye with providone iodine following topical lidocaine anesthesia. The silver nitrate sticks were touched to the surface of the cornea to induce a wound healing response and concurrent neovascularization. On day five, animals were anesthetized using ketamine/xylazine/acepromazine and vessel growth scores obtained. Animals were euthanized by CO₂ inhalation and digital images of each eye were obtained for quantitation of vessel growth using Image Pro Plus. Quantitated neovascular surface area was analyzed by ANOVA followed by two post-hoc tests including Dunnet's and Tukey-Kramer tests for significance at the 95% confidence level. Results are shown in FIG. 24 as percent inhibition of VEGF induced angiogenesis compared to VEGF control. As shown in the figure, several siNA constructs that target both VEGFr1 and VEGFr2 via homologous sequences (e.g., compound Nos. 33725/33731, 33737/33743, 33742/33748, and 33729/33735) provide inhibition of VEGF-induced angiogenesis in this model. These compounds appear to provide equal or greater inhibition than a siNA construct (Compound No. 31270/31273) targeting VEGFr1 only.

[0460] Evaluation of siNA Molecules in the Mouse Coroidal Model of Neovascularization.

[0461] Intraocular Administration of siNA

[0462] Female C57BL/6 mice (4-5 weeks old) were anesthetized with a 0.2 ml of a mixture of ketamine/xylazine (8:1), and the pupils were dilated with a single drop of 1% tropicamide. Then a 532 nm diode laser photocoagulation (75 μm spot size, 0.1-second duration, 120 mW) was used to generate three laser spots in each eye surrounding the optic nerve by using a hand-held coverslip as a contact lens. A bubble formed at the laser spot indicating a rupture of the Bruch's membrane. Next, the laser spots were evaluated for the presence of CNV on day 17 after laser treatment.

[0463] After laser induction of multiple CNV lesions in mice, the siNA was administered by intraocular injections under a dissecting microscope. Intravitreous injections were performed with a Harvard pump microinjection apparatus and pulled glass micropipets. Each micropipet was calibrated to deliver 1 μL of vehicle containing 0.5 ug or 1.5 ug of siNA, inverted control siNA, or saline. The mice were anesthetized, pupils were dilated, and, the sharpened tip of the micropipet was passed through the sclera, just behind the limbus into the vitreous cavity, and the foot switch was depressed. The injection was repeated at day 7 after laser photocoagulation.

[0464] At the time of death, mice were anesthetized (ketamine/xylazine mixture, 8:1) and perfused through the heart with 1 ml PBS containing 50 mg/ml fluorescein-labeled dextran (FITC-Dextran, 2 million average molecular weight, Sigma). The eyes were removed and fixed for overnight in 1% phosphate-buffered 4% Formalin. The cornea and the lens were removed and the neurosensory retina was carefully dissected from the eyecup. Five radial cuts were made from the edge of the eyecup to the equator; the sclera-choroid-retinal pigment epithelium (RPE) complex was flat-mounted, with the sclera facing down, on a glass slide in Aquamount. Flat mounts were examined with a Nikon fluorescence microscope. A laser spot with green vessels was scored CNV-positive, and a laser spot lacking green vessels was scored CNV-negative. Flatmounts were examined by fluorescence microscopy (Axioskop; Carl Zeiss, Thornwood, NY), and images were digitized with a three-color charge-coupled device (CCD) video camera and a frame grabber. Image-analysis software (Image-Pro Plus; Media Cybernetics, Silver Spring, Md.) was used to measure the total area of hyperfluorescence associated with each burn, corresponding to the total fibrovascular scar. The areas within each eye were averaged to give one experimental value per eye for plotting the areas.

[0465] Measurement of VEGFr1 expression was also determined using RT-PCR and/or real-time PCR. Retinal RNA was isolated by a Rnaeasy kit, and reverse transcription was performed with approximately 0.5 μg total RNA, reverse transcriptase (SuperScript II), and 5.0 μM oligo-d(T) primer. PCR amplification was performed using primers specific for VEGFR-1 (5′-AAGATGCCAGCCGAAGGAGA-3′, SEQ ID NO: 2550) and (5′-GGCTCGGCACCTATAGACA-3′, SEQ ID NO: 2551). Titrations were determined to ensure that PCR reactions were performed in the linear range of amplification. Mouse S16 ribosomal protein primers (5′-CACTGCAAACGGGGAAATGG-3′, SEQ ID NO: 2552 and 5′-TGAGATGGACTGTCGGATGG-3′, SEQ ID NO: 2553) were used to provide an internal control for the amount of template in the PCR reactions.

[0466] VEGFr1 site 349 active siNA having “Stab 9/10” chemistry (Compound No. 31270/31273, Table III) was tested for inhibition of VEGF-induced neovascularization at two different concentrations (1.5 ug, and 0.5 ug dose response) as compared to a matched chemistry 1.5 ug inverted control siNA construct (Compound No. 31276/31279, Table III) and a saline control. As shown in FIG. 17, the active siNA construct having “Stab 9/10” chemistry is highly effective in inhibiting VEGFr1 induced neovascularization (57% inhibition) in the C57BL/6 mice intraocular delivery model compared to the matched chemistry inverted control siNA. The active siNA construct was also highly effective in inhibiting VEGFr1 induced neovascularization (66% inhibition) compared to the saline control. Additionally, RT-PCR analysis of VEGFr1 site 349 siNA having “Stab 9/10” chemistry (Compound No. 31270/31273, Table III) showed significant reduction in the level of VEGFr1 mRNA compared to the inverted siNA construct (Compound No. 31276/31279, Table III) and saline. Furthermore, ELISA analysis of VEGFr1 protein using the active siNA and inverted control siNA above showed significant reduction in the level of VEGFr1 protein expression using the active siNA compared to the inactive siNA construct. These results demonstrate that siNA molecules having different chemically modified compositions, such as the modifications described herein, are capable of significantly inhibiting neovascularization as shown in this model of intraocular administration.

[0467] Periocular Administration of siNA

[0468] Female C57BL/6 mice (4-5 weeks old) were anesthetized with a 0.2 ml of a mixture of ketamine/xylazine (8:1), and the pupils were dilated with a single drop of 1% tropicamide. Then a 532 nm diode laser photocoagulation (75 μm spot size, 0.1-s duration, 120 mW) was used to generate three laser spots in each eye surrounding the optic nerve by using a hand-held coverslip as a contact lens. A bubble formed at the laser spot indicating a rupture of the Bruch's membrane. Next, the laser spots were evaluated for the presence of CNV on day 17 after laser treatment.

[0469] After laser induction of multiple CNV lesions in mice, the siNA was administered via periocular injections under a dissecting microscope. Periocular injections were performed with a Harvard pump microinjection apparatus and pulled glass micropipets. Each micropipet was calibrated to deliver 5 μL of vehicle containing test siNA at concentrations of 0.5 ug or 1.5 ug of siNA. The mice were anesthetized, pupils were dilated, and, the sharpened tip of the micropipet was passed, and the foot switch was depressed. Periocular injections were given daily starting at day 1 through day 14 after laser photocoagulation.

[0470] At the time of death, mice were anesthetized (ketamine/xylazine mixture, 8:1) and perfused through the heart with 1 mL PBS containing 50 mg/mL fluorescein-labeled dextran (FITC-Dextran, 2 million average molecular weight, Sigma). The eyes were removed and fixed overnight in 1% phosphate-buffered 4% Formalin. The cornea and the lens were removed and the neurosensory retina was carefully dissected from the eyecup. Five radial cuts were made from the edge of the eyecup to the equator; the sclera-choroid-retinal pigment epithelium (RPE) complex was flat-mounted, with the sclera facing down, on a glass slide in Aquamount. Flat mounts were examined with a Nikon fluorescence microscope. A laser spot with green vessels was scored CNV-positive, and a laser spot lacking green vessels was scored CNV-negative. Flatmounts were examined by fluorescence microscopy (Axioskop; Carl Zeiss, Thornwood, N.Y.) and images were digitized with a three-color charge-coupled device (CCD) video camera and a frame grabber. Image-analysis software (Image-Pro Plus; Media Cybernetics, Silver Spring, Md.) was used to measure the total area of hyperfluorescence associated with each burn, corresponding to the total fibrovascular scar. The areas within each eye were averaged to give one experimental value per eye.

[0471] VEGFr1 site 349 active siNA having “Stab 9/10” chemistry (Compound No. 31270/31273, Table III) was tested for inhibition of VEGF-induced neovascularization at two different concentrations (1.5 ug, and 0.5 ug dose response) as compared to a matched chemistry saline control and 0.5 ug inverted control siRNA construct (Compound No. 31276/31279, Table III). As shown in FIG. 18, the active siNA construct having “Stab 9/10” chemistry (Compound No. 31270/31273) is effective in inhibiting VEGFr1 induced neovascularization (20% inhibition) in the C57BL/6 mice periocular delivery model compared to the matched chemistry inverted control siNA. The active siNA construct was also highly effective in inhibiting VEGFr1 induced neovascularization (54% inhibition) compared to the saline control. In an additional assay shown in FIG. 19, VEGFr1 site 349 active siNA having “Stab 9/10” chemistry (Compound No. 31270/31273) at two concentrations was effective at inhibiting neovascularization in CNV lesions compared to the inverted siNA control and the saline control. As shown in FIG. 19, the active siNA construct having “Stab 9/10” chemistry (Compound No. 31270/31273) is effective in inhibiting VEGFr1 induced neovascularization (43% inhibition) in the C57BL/6 mice periocular delivery model compared to the matched chemistry inverted control siNA. The active siNA construct was also effective in inhibiting VEGFr1 induced neovascularization (33% inhibition) compared to the saline control. These results demonstrate that siNA molecules having different chemically modified compositions, such as the modifications described herein, are capable of significantly inhibiting neovascularization as shown in this model of periocular administration.

[0472] Evaluation of siNA Molecules in the Mouse 4T1-Luciferase Mammary Carcinoma Syngeneic Tumor Model

[0473] The current study is designed to determine if systemically administered siRNA directed against VEGFR-1 inhibits the growth of subcutaneous tumors. Test compounds included active Stab 9/10 siNA targeting site 349 of VEGFR-1 RNA (Compound # 31270/31273), a matched chemistry inactive inverted control siNA (Compound # 31276/31279) and saline. Animal subjects were female Balb/c mice approximately 20-25 g (5-7 weeks old). The number of subjects tested was 40 mice; treatment groups are described in Table VI. Mice were housed in groups of four. The feed, water, temperature and humidity conditions followed Pharmacology Testing Facility performance standards (SOP's) which are in accordance with the 1996 Guide for the Care and Use of Laboratory Animals (NRC). Animals were acclimated to the facility for at least 3 days prior to experimentation. During this time, animals were observed for overall health and sentinels were bled for baseline serology. 4T1-luc mammary carcinoma tumor cells were maintained in cell culture until injection into animals used in the study. On day 0 of the study, animals were anesthetized with ketamine/xylazine and 1.0×10⁶ cells in an injection volume of 100 μl were subcutaneously inoculated in the right flank. Primary tumor volume was measured using microcalipers. Length and width measurements were obtained from each tumor 3×/week (M,W,F) beginning 3 days after inoculation up through and including 21 days after inoculation. Tumor volumes were calculated from the length/width measurements according to the equation: Tumor volume=(a) (b)²/2 where a=the long axis of the tumor and b=the shorter axis of the tumor. Tumors were allowed to grow for a period of 3 days prior to dosing. Dosing consisted of a daily intravenous tail vein injection of the test compounds for 18 days. On day 21, animals were euthanized 24 hours following the last dose of test compound, or when the animals began to exhibit signs of moribundity (such as weight loss, lethargia, lack of grooming etc.) using CO₂ inhalation and lungs were subsequently removed. Lung metastases were counted under a Leitz dissecting microscope at 25× magnification. Tumors were removed and flash frozen in LN₂ for analysis of immunohistochemical endpoints or mRNA levels. Results are shown in FIG. 20. As shown in the Figure, the active siNA construct inhibited tumor growth by 50% compared to the inactive control siNA construct. In addition, levels of soluble VEGFr1 in plasma were assessed in mice treated with the active and inverted control siNA constucts. FIG. 21 shows results in the reduction of soluble VEGFr1 serum levels in the mouse 4T1-luciferase mammary carcinoma syngeneic tumor model using active Stab 9/10 siNA targeting site 349 of VEGFr-1 RNA (Compound # 31270/31273) compared to a matched chemistry inactive inverted control siNA (Compound # 31276/31279). As shown in FIG. 21, the active siNA construct is effective in reducing soluble VEGFr1 serum levels in this model

### Example 11

### Indications

[0474] The present body of knowledge in VEGF and/or VEGFr research indicates the need for methods to assay VEGF and/or VEGFr activity and for compounds that can regulate VEGF and/or VEGFr expression for research, diagnostic, and therapeutic use. As described herein, the nucleic acid molecules of the present invention can be used in assays to diagnose disease state related of VEGF and/or VEGFr levels. In addition, the nucleic acid molecules can be used to treat disease state related to VEGF and/or VEGFr levels.

[0475] Particular conditions and disease states that can be associated with VEGF and/or VEGFr expression modulation include, but are not limited to:

[0476] 1) Tumor angiogenesis: Angiogenesis has been shown to be necessary for tumors to grow into pathological size (Folkman, 1971, PNAS 76, 5217-5221; Wellstein & Czubayko, 1996, Breast Cancer Res and Treatment 38, 109-119). In addition, it allows tumor cells to travel through the circulatory system during metastasis. Increased levels of gene expression of a number of angiogenic factors such as vascular endothelial growth factor (VEGF) have been reported in vascularized and edema-associated brain tumors (Berkman et al., 1993 J Clini. Invest. 91, 153). A more direct demonstration of the role of VEGF in tumor angiogenesis was demonstrated by Jim Kim et al., 1993 Nature 362,841 wherein, monoclonal antibodies against VEGF were successfully used to inhibit the growth of rhabdomyosarcoma, glioblastoma multiforme cells in nude mice. Similarly, expression of a dominant negative mutated form of the flt-1 VEGF receptor inhibits vascularization induced by human glioblastoma cells in nude mice (Millauer et al., 1994, Nature 367, 576). Specific tumor/cancer types that can be targeted using the nucleic acid molecules of the invention include but are not limited to the tumor/cancer types described herein.

[0477] 2) Ocular diseases: Neovascularization has been shown to cause or exacerbate ocular diseases including, but not limited to, macular degeneration, neovascular glaucoma, diabetic retinopathy, myopic degeneration, and trachoma (Norrby, 1997, APMIS 105, 417-437). Aiello et al., 1994 New Engl. J. Med. 331, 1480, showed that the ocular fluid of a majority of patients suffering from diabetic retinopathy and other retinal disorders contains a high concentration of VEGF. Miller et al., 1994 Am. J. Pathol. 145, 574, reported elevated levels of VEGF mRNA in patients suffering from retinal ischemia. These observations support a direct role for VEGF in ocular diseases. Other factors, including those that stimulate VEGF synthesis, may also contribute to these indications.

[0478] 3) Dermatological Disorders: Many indications have been identified which may beangiogenesis dependent, including but not limited to, psoriasis, verruca vulgaris, angiofibroma of tuberous sclerosis, pot-wine stains, Sturge Weber syndrome, Kippel-Trenaunay-Weber syndrome, and Osler-Weber-Rendu syndrome (Norrby, supra). Intradermal injection of the angiogenic factor b-FGF demonstrated angiogenesis in nude mice (Weckbecker et al., 1992, Angiogenesis: Key principles-Science-Technology-Medicine, ed R. Steiner). Detmar et al., 1994 J. Exp. Med. 180, 1141 reported that VEGF and its receptors were over-expressed in psoriatic skin and psoriatic dermal microvessels, suggesting that VEGF plays a significant role in psoriasis.

[0479] 4) Rheumatoid arthritis: Immunohistochemistry and in situ hybridization studies on tissues from the joints of patients suffering from rheumatoid arthritis show an increased level of VEGF and its receptors (Fava et al., 1994 J. Exp. Med. 180, 341). Additionally, Koch et al., 1994 J. Immunol. 152, 4149, found that VEGF-specific antibodies were able to significantly reduce the mitogenic activity of synovial tissues from patients suffering from rheumatoid arthritis. These observations support a direct role for VEGF in rheumatoid arthritis. Other angiogenic factors including those of the present invention may also be involved in arthritis.

[0480] 5) Endometriosis: Various studies indicate that VEGF is directly implicated in endometriosis. In one study, VEGF concentrations measured by ELISA in peritoneal fluid were found to be significantly higher in women with endometriosis than in women without endometriosis (24.1±15 ng/ml vs 13.3±7.2 ng/ml in normals). In patients with endometriosis, higher concentrations of VEGF were detected in the proliferative phase of the menstrual cycle (33±13 ng/ml) compared to the secretory phase (10.7±5 ng/ml). The cyclic variation was not noted in fluid from normal patients (McLaren et al., 1996, Human Reprod. 11, 220-223). In another study, women with moderate to severe endometriosis had significantly higher concentrations of peritoneal fluid VEGF than women without endometriosis. There was a positive correlation between the severity of endometriosis and the concentration of VEGF in peritoneal fluid. In human endometrial biopsies, VEGF expression increased relative to the early proliferative phase approximately 1.6-, 2-, and 3.6-fold in midproliferative, late proliferative, and secretory endometrium (Shifren et al., 1996, J. Clin. Endocrinol. Metab. 81, 3112-3118). In a third study, VEGF-positive staining of human ectopic endometrium was shown to be localized to macrophages (double immunofluorescent staining with CD14 marker). Peritoneal fluid macrophages demonstrated VEGF staining in women with and without endometriosis. However, increased activation of macrophages (acid phosphatatse activity) was demonstrated in fluid from women with endometriosis compared with controls. Peritoneal fluid macrophage conditioned media from patients with endometriosis resulted in significantly increased cell proliferation ([³H] thymidine incorporation) in HUVEC cells compared to controls. The percentage of peritoneal fluid macrophages with VEGFr2 mRNA was higher during the secretory phase, and significantly higher in fluid from women with endometriosis (80±15%) compared with controls (32±20%). Flt-mRNA was detected in peritoneal fluid macrophages from women with and without endometriosis, but there was no difference between the groups or any evidence of cyclic dependence (McLaren et al., 1996, J. Clin. Invest. 98, 482-489). In the early proliferative phase of the menstrual cycle, VEGF has been found to be expressed in secretory columnar epithelium (estrogen-responsive) lining both the oviducts and the uterus in female mice. During the secretory phase, VEGF expression was shown to have shifted to the underlying stroma composing the functional endometrium. In addition to examining the endometium, neovascularization of ovarian follicles and the corpus luteum, as well as angiogenesis in embryonic implantation sites have been analyzed. For these processes, VEGF was expressed in spatial and temporal proximity to forming vasculature (Shweiki et al., 1993, J. Clin. Invest. 91, 2235-2243).

[0481] 6) Kidney disease: Autosomal dominant polycystic kidney disease (ADPKD) is the most common life threatening hereditary disease in the USA. It affects about 1:400 to 1:1000 people and approximately 50% of people with ADPKD develop renal failure. ADPKD accounts for about 5-10% of end-stage renal failure in the USA, requiring dialysis and renal transplantation. Angiogenesis is implicated in the progression of ADPKD for growth of cyst cells, as well as increased vascular permeability promoting fluid secretion into cysts. Proliferation of cystic epithelium is a feature of ADPKD because cyst cells in culture produce soluble vascular endothelial growth factor (VEGF). VEGFr1 has been detected in epithelial cells of cystic tubules but not in endothelial cells in the vasculature of cystic kidneys or normal kidneys. VEGFr2 expression is increased in endothelial cells of cyst vessels and in endothelial cells during renal ischemia-reperfusion.

[0482] The use of radiation treatments and chemotherapeutics, such as Gemcytabine and cyclophosphamide, are non-limiting examples of chemotherapeutic agents that can be combined with or used in conjunction with the nucleic acid molecules (e.g. siNA molecules) of the instant invention. Those skilled in the art will recognize that other anti-cancer compounds and therapies can similarly be readily combined with the nucleic acid molecules of the instant invention (e.g. siNA molecules) and are hence within the scope of the instant invention. Such compounds and therapies are well known in the art (see for example Cancer: Principles and Practice of Oncology, Volumes 1 and 2, eds Devita, V. T., Hellman, S., and Rosenberg, S. A., J. B. Lippincott Company, Philadelphia, USA; incorporated herein by reference) and include, without limitation, folates, antifolates, pyrimidine analogs, fluoropyrimidines, purine analogs, adenosine analogs, topoisomerase I inhibitors, anthrapyrazoles, retinoids, antibiotics, anthacyclins, platinum analogs, alkylating agents, nitrosoureas, plant derived compounds such as vinca alkaloids, epipodophyllotoxins, tyrosine kinase inhibitors, taxols, radiation therapy, surgery, nutritional supplements, gene therapy, radiotherapy, for example 3D-CRT, immunotoxin therapy, for example ricin, and monoclonal antibodies. Specific examples of chemotherapeutic compounds that can be combined with or used in conjunction with the nucleic acid molecules of the invention include, but are not limited to, Paclitaxel; Docetaxel; Methotrexate; Doxorubin; Edatrexate; Vinorelbine; Tomaxifen; Leucovorin; 5-fluoro uridine (5-FU); lonotecan; Cisplatin; Carboplatin; Amsacrine; Cytarabine; Bleomycin; Mitomycin C; Dactinomycin; Mithramycin; Hexamethylmelamine; Dacarbazine; L-asperginase; Nitrogen mustard; Melphalan, Chlorambucil; Busulfan; Ifosfamide; 4-hydroperoxycyclophosphamide; Thiotepa; Irinotecan (CAMPTOSAR®, CPT-11, Camptothecin-1, Campto) Tamoxifen; Herceptin; IMC C225; ABX-EGF; and combinations thereof. The above list of compounds are non-limiting examples of compounds and/or methods that can be combined with or used in conjunction with the nucleic acid molecules (e.g. siNA) of the instant invention. Those skilled in the art will recognize that other drug compounds and therapies can similarly be readily combined with the nucleic acid molecules of the instant invention (e.g., siNA molecules) are hence within the scope of the instant invention.

### Example 12

### Diagnostic Uses

[0483] The siNA molecules of the invention can be used in a variety of diagnostic applications, such as in the identification of molecular targets (e.g., RNA) in a variety of applications, for example, in clinical, industrial, environmental, agricultural and/or research settings. Such diagnostic use of siNA molecules involves utilizing reconstituted RNAi systems, for example, using cellular lysates or partially purified cellular lysates. siNA molecules of this invention can be used as diagnostic tools to examine genetic drift and mutations within diseased cells or to detect the presence of endogenous or exogenous, for example viral, RNA in a cell. The close relationship between siNA activity and the structure of the target RNA allows the detection of mutations in any region of the molecule, which alters the base-pairing and three-dimensional structure of the target RNA. By using multiple siNA molecules described in this invention, one can map nucleotide changes, which are important to RNA structure and function in vitro, as well as in cells and tissues. Cleavage of target RNAs with siNA molecules can be used to inhibit gene expression and define the role of specified gene products in the progression of disease or infection. In this manner, other genetic targets can be defined as important mediators of the disease. These experiments will lead to better treatment of the disease progression by affording the possibility of combination therapies (e.g., multiple siNA molecules targeted to different genes, siNA molecules coupled with known small molecule inhibitors, or intermittent treatment with combinations siNA molecules and/or other chemical or biological molecules). Other in vitro uses of siNA molecules of this invention are well known in the art, and include detection of the presence of mRNAs associated with a disease, infection, or related condition. Such RNA is detected by determining the presence of a cleavage product after treatment with a siNA using standard methodologies, for example, fluorescence resonance emission transfer (FRET).

[0484] In a specific example, siNA molecules that cleave only wild-type or mutant forms of the target RNA are used for the assay. The first siNA molecules (i.e., those that cleave only wild-type forms of target RNA) are used to identify wild-type RNA present in the sample and the second siNA molecules (i.e., those that cleave only mutant forms of target RNA) are used to identify mutant RNA in the sample. As reaction controls, synthetic substrates of both wild-type and mutant RNA are cleaved by both siNA molecules to demonstrate the relative siNA efficiencies in the reactions and the absence of cleavage of the “non-targeted” RNA species. The cleavage products from the synthetic substrates also serve to generate size markers for the analysis of wild-type and mutant RNAs in the sample population. Thus, each analysis requires two siNA molecules, two substrates and one unknown sample, which is combined into six reactions. The presence of cleavage products is determined using an RNase protection assay so that full-length and cleavage fragments of each RNA can be analyzed in one lane of a polyacrylamide gel. It is not absolutely required to quantify the results to gain insight into the expression of mutant RNAs and putative risk of the desired phenotypic changes in target cells. The expression of mRNA whose protein product is implicated in the development of the phenotype (i.e., disease related or infection related) is adequate to establish risk. If probes of comparable specific activity are used for both transcripts, then a qualitative comparison of RNA levels is adequate and decreases the cost of the initial diagnosis. Higher mutant form to wild-type ratios are correlated with higher risk whether RNA levels are compared qualitatively or quantitatively.

[0485] All patents and publications mentioned in the specification are indicative of the levels of skill of those skilled in the art to which the invention pertains. All references cited in this disclosure are incorporated by reference to the same extent as if each reference had been incorporated by reference in its entirety individually.

[0486] One skilled in the art would readily appreciate that the present invention is well adapted to carry out the objects and obtain the ends and advantages mentioned, as well as those inherent therein. The methods and compositions described herein as presently representative of preferred embodiments are exemplary and are not intended as limitations on the scope of the invention. Changes therein and other uses will occur to those skilled in the art, which are encompassed within the spirit of the invention, are defined by the scope of the claims.

[0487] It will be readily apparent to one skilled in the art that varying substitutions and modifications can be made to the invention disclosed herein without departing from the scope and spirit of the invention. Thus, such additional embodiments are within the scope of the present invention and the following claims. The present invention teaches one skilled in the art to test various combinations and/or substitutions of chemical modifications described herein toward generating nucleic acid constructs with improved activity for mediating RNAi activity. Such improved activity can comprise improved stability, improved bioavailability, and/or improved activation of cellular responses mediating RNAi. Therefore, the specific embodiments described herein are not limiting and one skilled in the art can readily appreciate that specific combinations of the modifications described herein can be tested without undue experimentation toward identifying siNA molecules with improved RNAi activity.

[0488] The invention illustratively described herein suitably can be practiced in the absence of any element or elements, limitation or limitations that are not specifically disclosed herein. Thus, for example, in each instance herein any of the terms “comprising”, “consisting essentially of”, and “consisting of” may be replaced with either of the other two terms. The terms and expressions which have been employed are used as terms of description and not of limitation, and there is no intention that in the use of such terms and expressions of excluding any equivalents of the features shown and described or portions thereof, but it is recognized that various modifications are possible within the scope of the invention claimed. Thus, it should be understood that although the present invention has been specifically disclosed by preferred embodiments, optional features, modification and variation of the concepts herein disclosed may be resorted to by those skilled in the art, and that such modifications and variations are considered to be within the scope of this invention as defined by the description and the appended claims.

[0489] In addition, where features or aspects of the invention are described in terms of Markush groups or other grouping of alternatives, those skilled in the art will recognize that the invention is also thereby described in terms of any individual member or subgroup of members of the Markush group or other group.

TABLE I
VEGF and VEGFr Accession Numbers

NM_005429
Homo sapiens vascular endothelial growth factor C
(VEGFC), mRNA
gi|19924300|ref|NM_005429.2|[19924300]
NM_003376
Homo sapiens vascular endothelial growth factor
(VEGF), mRNA
gi|19923239|ref|NM_003376.2|[19923239]
AF095785
Homo sapiens vascular endothelial growth factor (VEGF)
gene, promoter region and
partial cds
gi|4154290|gb|AF095785.1|[4154290]
NM_003377
Homo sapiens vascular endothelial growth factor B
(VEGFB), mRNA
gi|20070172|ref|NM_003377.2|[20070172]
AF486837
Homo sapiens vascular endothelial growth factor
isoform VEGF165 (VEGF) mRNA,
complete cds
gi|19909064|gb|AF486837.1|[19909064]
AF468110
Homo sapiens vascular endothelial growth factor B
isoform (VEGFB) gene, complete
cds, alternatively spliced
gi|18766397|gb|AF468110.1|[18766397]
AF437895
Homo sapiens vascular endothelial growth factor (VEGF)
gene, partial cds
gi|16660685|gb|AF437895.1|AF437895[16660685]
AY047581
Homo sapiens vascular endothelial growth factor (VEGF)
mRNA, complete cds
gi|15422108|gb|AY047581.1|[15422108]
AF063657
Homo sapiens vascular endothelial growth factor
receptor (FLT1) mRNA, complete
cds
gi|3132830|gb|AF063657.1|AF063657[3132830]
AF092127
Homo sapiens vascular endothelial growth factor (VEGF)
gene, partial sequence
gi|4139168|gb|AF092127.1|AF092127[4139168]
AF092126
Homo sapiens vascular endothelial growth factor (VEGF)
gene, 5′ UTR
gi|4139167|gb|AF092126.1|AF092126[4139167]
AF092125
Homo sapiens vascular endothelial growth factor (VEGF)
gene, partial cds
gi|4139165|gb|AF092125.1|AF092125[4139165]
E15157
Human VEGF mRNA
gi|5709840|dbj|E15157.1||pat|JP|1998052285|2[5709840]
E15156
Human VEGF mRNA
gi|5709839|dbj|E15156.1||pat|JP|1998052285|1[5709839]
E14233
Human mRNA for vascular endothelial growth factor
(VEGF), complete cds
gi|5708916|dbj|E14233.1||pat|JP|1997286795|1[5708916]
AF024710
Homo sapiens vascular endothelial growth factor (VEGF)
mRNA, 3′ UTR
gi|2565322|gb|AF024710.1|AF024710[2565322]
AJ010438
Homo sapiens mRNA for vascular endothelial growth
factor, splicing variant
VEGF183
gi|3647280|emb|AJ010438.1|HSA010438[3647280]
AF098331
Homo sapiens vascular endothelial growth factor (VEGF)
gene, promoter, partial
sequence
gi|4235431|gb|AF098331.1|AF098331[4235431]
AF022375
Homo sapiens vascular endothelial growth factor mRNA,
complete cds
gi|3719220|gb|AF022375.1|AF022375[3719220]
AH006909
vascular endothelial growth factor {alternative
splicing} [human, Genomic, 414
nt 5 segments]
gi|1680143|gb|AH006909.1||bbm|191843[1680143]
U01134
Human soluble vascular endothelial cell growth factor
receptor (sflt) mRNA,
complete cds
gi|451321|gb|U01134.1|U01134[451321]
E14000
Human mRNA for FLT
gi|3252767|dbj|E14000.1||pat|JP|1997255700|1[3252767]
E13332
cDNA encoding vascular endodermal cell growth factor
VEGF
gi|3252137|dbj|E13332.1||pat|JP|1997173075|1[3252137]
E13256
Human mRNA for FLT, complete cds
gi|3252061|dbj|E13256.1||pat|JP|1997154588|1[3252061]
AF063658
Homo sapiens vascular endothelial growth factor
receptor 2 (KDR) mRNA, complete
cds
gi|3132832|gb|AF063658.1|AF063658[3132832]
AJ000185
Homo sapiens mRNA for vascular endothelial growth
factor-D
gi|2879833|emb|AJ000185.1|HSAJ185[2879833]
D89630
Homo sapiens mRNA for VEGF-D, complete cds
gi|2780339|dbj|D89630.1|[2780339]
AF035121
Homo sapiens KDR/flk-1 protein mRNA, complete cds
gi|2655411|gb|AF035121.1|AF035121[2655411]
AF020393
Homo sapiens vascular endothelial growth factor C
gene, partial cds and 5′
upstream region
gi|2582366|gb|AF020393.1|AF020393[2582366]
Y08736
H. sapiens vegf gene, 3′ UTR
gi|1619596|emb|Y08736.1|HSVEGF3UT[1619596]
X62568
H. sapiens vegf gene for vascular endothelial growth
factor
gi|37658|emb|X62568.1|HSVEGF[37658]
X94216
H. sapiens mRNA for VEGF-C protein
gi|1177488|emb|X94216.1|HSVEGFC[1177488]
NM_002020
Homo sapiens fms-related tyrosine kinase 4 (FLT4),
mRNA
gi|4503752|ref|NM_002020.1|[4503752]
NM_002253
Homo sapiens kinase insert domain receptor (a type III
receptor tyrosine kinase)
(KDR), mRNA
gi|11321596|ref|NM_002253.1|[11321596]

[0490] TABLE II
VEGFr siNA and Target Sequences

| | | Seq | | | Seq | | | Seq |
|---|---|---|---|---|---|---|---|---|
| Pos | Target Sequence | ID | UPos | Upper seq | ID | LPos | Lower seq | ID |
| VEGFR1 gi\|4503748\|ref\|NM_002019.1 | | | | | | | | |
| 1 | GCGGACACUCCUCUCGGCU | 1 | 1 | GCGGACACUCCUCUCGGCU | 1 | 23 | AGCCGAGAGGAGUGUCCGC | 428 |
| 19 | UCCUCCCCGGCAGCGGCGG | 2 | 19 | UCCUCCCCGGCAGCGGCGG | 2 | 41 | CCGCCGCUGCCGGGGAGGA | 429 |
| 37 | GCGGCUCGGAGCGGGCUCC | 3 | 37 | GCGGCUCGGAGCGGGCUCC | 3 | 59 | GGAGCCCGCUCCGAGCCGC | 430 |
| 55 | CGGGGCUCGGGUGCAGCGG | 4 | 55 | CGGGGCUCGGGUGCAGCGG | 4 | 77 | CCGCUGCACCCGAGCCCCG | 431 |
| 73 | GCCAGCGGGCCUGGCGGCG | 5 | 73 | GCCAGCGGGCCUGGCGGCG | 5 | 95 | CGCCGCCAGGCCCGCUGGC | 432 |
| 91 | GAGGAUUACCCGGGGAAGU | 6 | 91 | GAGGAUUACCCGGGGAAGU | 6 | 113 | ACUUCCCCGGGUAAUCCUC | 433 |
| 109 | UGGUUGUCUCCUGGCUGGA | 7 | 109 | UGGUUGUCUCCUGGCUGGA | 7 | 131 | UCCAGCCAGGAGACAACCA | 434 |
| 127 | AGCCGCGAGACGGGCGCUC | 8 | 127 | AGCCGCGAGACGGGCGCUC | 8 | 149 | GAGCGCCCGUCUCGCGGCU | 435 |
| 145 | CAGGGCGCGGGGCCGGCGG | 9 | 145 | CAGGGCGCGGGGCCGGCGG | 9 | 167 | CCGCCGGCCCCGCGCCCUG | 436 |
| 163 | GCGGCGAACGAGAGGACGG | 10 | 163 | GCGGCGAACGAGAGGACGG | 10 | 185 | CCGUCCUCUCGUUCGCCGC | 437 |
| 181 | GACUCUGGCGGCCGGGUCG | 11 | 181 | GACUCUGGCGGCCGGGUCG | 11 | 203 | CGACCCGGCCGCCAGAGUC | 438 |
| 199 | GUUGGCCGGGGGAGCGCGG | 12 | 199 | GUUGGCCGGGGGAGCGCGG | 12 | 221 | CCGCGCUCCCCCGGCCAAC | 439 |
| 217 | GGCACCGGGCGAGCAGGCC | 13 | 217 | GGCACCGGGCGAGCAGGCC | 13 | 239 | GGCCUGCUCGCCCGGUGCC | 440 |
| 235 | CGCGUCGCGCUCACCAUGG | 14 | 235 | CGCGUCGCGCUCACCAUGG | 14 | 257 | CCAUGGUGAGCGCGACGCG | 441 |
| 253 | GUCAGCUACUGGGACACCG | 15 | 253 | GUCAGCUACUGGGACACCG | 15 | 275 | CGGUGUCCCAGUAGCUGAC | 442 |
| 271 | GGGGUCCUGCUGUGCGCGC | 16 | 271 | GGGGUCCUGCUGUGCGCGC | 16 | 293 | GCGCGCACAGCAGGACCCC | 443 |
| 289 | CUGCUCAGCUGUCUGCUUC | 17 | 289 | CUGCUCAGCUGUCUGCUUC | 17 | 311 | GAAGCAGACAGCUGAGCAG | 444 |
| 307 | CUCACAGGAUCUAGUUCAG | 18 | 307 | CUCACAGGAUCUAGUUCAG | 18 | 329 | CUGAACUAGAUCCUGUGAG | 445 |
| 325 | GGUUCAAAAUUAAAAGAUC | 19 | 325 | GGUUCAAAAUUAAAAGAUC | 19 | 347 | GAUCUUUUAAUUUUGAACC | 446 |
| 343 | CCUGAACUGAGUUUAAAAG | 20 | 343 | CCUGAACUGAGUUUAAAAG | 20 | 365 | CUUUUAAACUCAGUUCAGG | 447 |
| 361 | GGCACCCAGCACAUCAUGC | 21 | 361 | GGCACCCAGCACAUCAUGC | 21 | 383 | GCAUGAUGUGCUGGGUGCC | 448 |
| 379 | CAAGCAGGCCAGACACUGC | 22 | 379 | CAAGCAGGCCAGACACUGC | 22 | 401 | GCAGUGUCUGGCCUGCUUG | 449 |
| 397 | CAUCUCCAAUGCAGGGGGG | 23 | 397 | CAUCUCCAAUGCAGGGGGG | 23 | 419 | CCCCCCUGCAUUGGAGAUG | 450 |
| 415 | GAAGCAGCCCAUAAAUGGU | 24 | 415 | GAAGCAGCCCAUAAAUGGU | 24 | 437 | ACCAUUUAUGGGCUGCUUC | 451 |
| 433 | UCUUUGCCUGAAAUGGUGA | 25 | 433 | UCUUUGCCUGAAAUGGUGA | 25 | 455 | UCACCAUUUCAGGCAAAGA | 452 |
| 451 | AGUAAGGAAAGCGAAAGGC | 26 | 451 | AGUAAGGAAAGCGAAAGGC | 26 | 473 | GCCUUUCGCUUUCCUUACU | 453 |
| 469 | CUGAGCAUAACUAAAUCUG | 27 | 469 | CUGAGCAUAACUAAAUCUG | 27 | 491 | CAGAUUUAGUUAUGCUCAG | 454 |
| 487 | GCCUGUGGAAGAAAUGGCA | 28 | 487 | GCCUGUGGAAGAAAUGGCA | 28 | 509 | UGCCAUUUCUUCCACAGGC | 455 |
| 505 | AAACAAUUCUGCAGUACUU | 29 | 505 | AAACAAUUCUGCAGUACUU | 29 | 527 | AAGUACUGCAGAAUUGUUU | 456 |
| 523 | UUAACCUUGAACACAGCUC | 30 | 523 | UUAACCUUGAACACAGCUC | 30 | 545 | GAGCUGUGUUCAAGGUUAA | 457 |
| 541 | CAAGCAAACCACACUGGCU | 31 | 541 | CAAGCAAACCACACUGGCU | 31 | 563 | AGCCAGUGUGGUUUGCUUG | 458 |
| 559 | UUCUACAGCUGCAAAUAUC | 32 | 559 | UUCUACAGCUGCAAAUAUC | 32 | 581 | GAUAUUUGCAGCUGUAGAA | 459 |
| 577 | CUAGCUGUACCUACUUCAA | 33 | 577 | CUAGCUGUACCUACUUCAA | 33 | 599 | UUGAAGUAGGUACAGCUAG | 460 |
| 595 | AAGAAGAAGGAAACAGAAU | 34 | 595 | AAGAAGAAGGAAACAGAAU | 34 | 617 | AUUCUGUUUCCUUCUUCUU | 461 |
| 613 | UCUGCAAUCUAUAUAUUUA | 35 | 613 | UCUGCAAUCUAUAUAUUUA | 35 | 635 | UAAAUAUAUAGAUUGCAGA | 462 |
| 631 | AUUAGUGAUACAGGUAGAC | 36 | 631 | AUUAGUGAUACAGGUAGAC | 36 | 653 | GUCUACCUGUAUCACUAAU | 463 |
| 649 | CCUUUCGUAGAGAUGUACA | 37 | 649 | CCUUUCGUAGAGAUGUACA | 37 | 671 | UGUACAUCUCUACGAAAGG | 464 |
| 667 | AGUGAAAUCCCCGAAAUUA | 38 | 667 | AGUGAAAUCCCCGAAAUUA | 38 | 689 | UAAUUUCGGGGAUUUCACU | 465 |
| 685 | AUACACAUGACUGAAGGAA | 39 | 685 | AUACACAUGACUGAAGGAA | 39 | 707 | UUCCUUCAGUCAUGUGUAU | 466 |
| 703 | AGGGAGCUCGUCAUUCCCU | 40 | 703 | AGGGAGCUCGUCAUUCCCU | 40 | 725 | AGGGAAUGACGAGCUCCCU | 467 |
| 721 | UGCCGGGUUACGUCACCUA | 41 | 721 | UGCCGGGUUACGUCACCUA | 41 | 743 | UAGGUGACGUAACCCGGCA | 468 |
| 739 | AACAUCACUGUUACUUUAA | 42 | 739 | AACAUCACUGUUACUUUAA | 42 | 761 | UUAAAGUAACAGUGAUGUU | 469 |
| 757 | AAAAAGUUUCCACUUGACA | 43 | 757 | AAAAAGUUUCCACUUGACA | 43 | 779 | UGUCAAGUGGAAACUUUUU | 470 |
| 775 | ACUUUGAUCCCUGAUGGAA | 44 | 775 | ACUUUGAUCCCUGAUGGAA | 44 | 797 | UUCCAUCAGGGAUCAAAGU | 471 |
| 793 | AAACGCAUAAUCUGGGACA | 45 | 793 | AAACGCAUAAUCUGGGACA | 45 | 815 | UGUCCCAGAUUAUGCGUUU | 472 |
| 811 | AGUAGAAAGGGCUUCAUCA | 46 | 811 | AGUAGAAAGGGCUUCAUCA | 46 | 833 | UGAUGAAGCCCUUUCUACU | 473 |
| 829 | AUAUCAAAUGCAACGUACA | 47 | 829 | AUAUCAAAUGCAACGUACA | 47 | 851 | UGUACGUUGCAUUUGAUAU | 474 |
| 847 | AAAGAAAUAGGGCUUCUGA | 48 | 847 | AAAGAAAUAGGGCUUCUGA | 48 | 869 | UCAGAAGCCCUAUUUCUUU | 475 |
| 865 | ACCUGUGAAGCAACAGUCA | 49 | 865 | ACCUGUGAAGCAACAGUCA | 49 | 887 | UGACUGUUGCUUCACAGGU | 476 |
| 883 | AAUGGGCAUUUGUAUAAGA | 50 | 883 | AAUGGGCAUUUGUAUAAGA | 50 | 905 | UCUUAUACAAAUGCCCAUU | 477 |
| 901 | ACAAACUAUCUCACACAUC | 51 | 901 | ACAAACUAUCUCACACAUC | 51 | 923 | GAUGUGUGAGAUAGUUUGU | 478 |
| 919 | CGACAAACCAAUACAAUCA | 52 | 919 | CGACAAACCAAUACAAUCA | 52 | 941 | UGAUUGUAUUGGUUUGUCG | 479 |
| 937 | AUAGAUGUCCAAAUAAGCA | 53 | 937 | AUAGAUGUCCAAAUAAGCA | 53 | 959 | UGCUUAUUUGGACAUCUAU | 480 |
| 955 | ACACCACGCCCAGUCAAAU | 54 | 955 | ACACCACGCCCAGUCAAAU | 54 | 977 | AUUUGACUGGGCGUGGUGU | 481 |
| 973 | UUACUUAGAGGCCAUACUC | 55 | 973 | UUACUUAGAGGCCAUACUC | 55 | 995 | GAGUAUGGCCUCUAAGUAA | 482 |
| 991 | CUUGUCCUCAAUUGUACUG | 56 | 991 | CUUGUCCUCAAUUGUACUG | 56 | 1013 | CAGUACAAUUGAGGACAAG | 483 |
| 1009 | GCUACCACUCCCUUGAACA | 57 | 1009 | GCUACCACUCCCUUGAACA | 57 | 1031 | UGUUCAAGGGAGUGGUAGC | 484 |
| 1027 | ACGAGAGUUCAAAUGACCU | 58 | 1027 | ACGAGAGUUCAAAUGACCU | 58 | 1049 | AGGUCAUUUGAACUCUCGU | 485 |
| 1045 | UGGAGUUACCCUGAUGAAA | 59 | 1045 | UGGAGUUACCCUGAUGAAA | 59 | 1067 | UUUCAUCAGGGUAACUCCA | 486 |
| 1063 | AAAAAUAAGAGAGCUUCCG | 60 | 1063 | AAAAAUAAGAGAGCUUCCG | 60 | 1085 | CGGAAGCUCUCUUAUUUUU | 487 |
| 1081 | GUAAGGCGACGAAUUGACC | 61 | 1081 | GUAAGGCGACGAAUUGACC | 61 | 1103 | GGUCAAUUCGUCGCCUUAC | 488 |
| 1099 | CAAAGCAAUUCCCAUGCCA | 62 | 1099 | CAAAGCAAUUCCCAUGCCA | 62 | 1121 | UGGCAUGGGAAUUGCUUUG | 489 |
| 1117 | AACAUAUUCUACAGUGUUC | 63 | 1117 | AACAUAUUCUACAGUGUUC | 63 | 1139 | GAACACUGUAGAAUAUGUU | 490 |
| 1135 | CUUACUAUUGACAAAAUGC | 64 | 1135 | CUUACUAUUGACAAAAUGC | 64 | 1157 | GCAUUUUGUCAAUAGUAAG | 491 |
| 1153 | CAGAACAAAGACAAAGGAC | 65 | 1153 | CAGAACAAAGACAAAGGAC | 65 | 1175 | GUCCUUUGUCUUUGUUCUG | 492 |
| 1171 | CUUUAUACUUGUCGUGUAA | 66 | 1171 | CUUUAUACUUGUCGUGUAA | 66 | 1193 | UUACACGACAAGUAUAAAG | 493 |
| 1189 | AGGAGUGGACCAUCAUUCA | 67 | 1189 | AGGAGUGGACCAUCAUUCA | 67 | 1211 | UGAAUGAUGGUCCACUCCU | 494 |
| 1207 | AAAUCUGUUAACACCUCAG | 68 | 1207 | AAAUCUGUUAACACCUCAG | 68 | 1229 | CUGAGGUGUUAACAGAUUU | 495 |
| 1225 | GUGCAUAUAUAUGAUAAAG | 69 | 1225 | GUGCAUAUAUAUGAUAAAG | 69 | 1247 | CUUUAUCAUAUAUAUGCAC | 496 |
| 1243 | GCAUUCAUCACUGUGAAAC | 70 | 1243 | GCAUUCAUCACUGUGAAAC | 70 | 1265 | GUUUCACAGUGAUGAAUGC | 497 |
| 1261 | CAUCGAAAACAGCAGGUGC | 71 | 1261 | CAUCGAAAACAGCAGGUGC | 71 | 1283 | GCACCUGCUGUUUUCGAUG | 498 |
| 1279 | CUUGAAACCGUAGCUGGCA | 72 | 1279 | CUUGAAACCGUAGCUGGCA | 72 | 1301 | UGCCAGCUACGGUUUCAAG | 499 |
| 1297 | AAGCGGUCUUACCGGCUCU | 73 | 1297 | AAGCGGUCUUACCGGCUCU | 73 | 1319 | AGAGCCGGUAAGACCGCUU | 500 |
| 1315 | UCUAUGAAAGUGAAGGCAU | 74 | 1315 | UCUAUGAAAGUGAAGGCAU | 74 | 1337 | AUGCCUUCACUUUCAUAGA | 501 |
| 1333 | UUUCCCUCGCCGGAAGUUG | 75 | 1333 | UUUCCCUCGCCGGAAGUUG | 75 | 1355 | CAACUUCCGGCGAGGGAAA | 502 |
| 1351 | GUAUGGUUAAAAGAUGGGU | 76 | 1351 | GUAUGGUUAAAAGAUGGGU | 76 | 1373 | ACCCAUCUUUUAACCAUAC | 503 |
| 1369 | UUACCUGCGACUGAGAAAU | 77 | 1369 | UUACCUGCGACUGAGAAAU | 77 | 1391 | AUUUCUCAGUCGCAGGUAA | 504 |
| 1387 | UCUGCUCGCUAUUUGACUC | 78 | 1387 | UCUGCUCGCUAUUUGACUC | 78 | 1409 | GAGUCAAAUAGCGAGCAGA | 505 |
| 1405 | CGUGGCUACUCGUUAAUUA | 79 | 1405 | CGUGGCUACUCGUUAAUUA | 79 | 1427 | UAAUUAACGAGUAGCCACG | 506 |
| 1423 | AUCAAGGACGUAACUGAAG | 80 | 1423 | AUCAAGGACGUAACUGAAG | 80 | 1445 | CUUCAGUUACGUCCUUGAU | 507 |
| 1441 | GAGGAUGCAGGGAAUUAUA | 81 | 1441 | GAGGAUGCAGGGAAUUAUA | 81 | 1463 | UAUAAUUCCCUGCAUCCUC | 508 |
| 1459 | ACAAUCUUGCUGAGCAUAA | 82 | 1459 | ACAAUCUUGCUGAGCAUAA | 82 | 1481 | UUAUGCUCAGCAAGAUUGU | 509 |
| 1477 | AAACAGUCAAAUGUGUUUA | 83 | 1477 | AAACAGUCAAAUGUGUUUA | 83 | 1499 | UAAACACAUUUGACUGUUU | 510 |
| 1495 | AAAAACCUCACUGCCACUC | 84 | 1495 | AAAAACCUCACUGCCACUC | 84 | 1517 | GAGUGGCAGUGAGGUUUUU | 511 |
| 1513 | CUAAUUGUCAAUGUGAAAC | 85 | 1513 | CUAAUUGUCAAUGUGAAAC | 85 | 1535 | GUUUCACAUUGACAAUUAG | 512 |
| 1531 | CCCCAGAUUUACGAAAAGG | 86 | 1531 | CCCCAGAUUUACGAAAAGG | 86 | 1553 | CCUUUUCGUAAAUCUGGGG | 513 |
| 1549 | GCCGUGUCAUCGUUUCCAG | 87 | 1549 | GCCGUGUCAUCGUUUCCAG | 87 | 1571 | CUGGAAACGAUGACACGGC | 514 |
| 1567 | GACCCGGCUCUCUACCCAC | 88 | 1567 | GACCCGGCUCUCUACCCAC | 88 | 1589 | GUGGGUAGAGAGCCGGGUC | 515 |
| 1585 | CUGGGCAGCAGACAAAUCC | 89 | 1585 | CUGGGCAGCAGACAAAUCC | 89 | 1607 | GGAUUUGUCUGCUGCCCAG | 516 |
| 1603 | CUGACUUGUACCGCAUAUG | 90 | 1603 | CUGACUUGUACCGCAUAUG | 90 | 1625 | CAUAUGCGGUACAAGUCAG | 517 |
| 1621 | GGUAUCCCUCAACCUACAA | 91 | 1621 | GGUAUCCCUCAACCUACAA | 91 | 1643 | UUGUAGGUUGAGGGAUACC | 518 |
| 1639 | AUCAAGUGGUUCUGGCACC | 92 | 1639 | AUCAAGUGGUUCUGGCACC | 92 | 1661 | GGUGCCAGAACCACUUGAU | 519 |
| 1657 | CCCUGUAACCAUAAUCAUU | 93 | 1657 | CCCUGUAACCAUAAUCAUU | 93 | 1679 | AAUGAUUAUGGUUACAGGG | 520 |
| 1675 | UCCGAAGCAAGGUGUGACU | 94 | 1675 | UCCGAAGCAAGGUGUGACU | 94 | 1697 | AGUCACACCUUGCUUCGGA | 521 |
| 1693 | UUUUGUUCCAAUAAUGAAG | 95 | 1693 | UUUUGUUCCAAUAAUGAAG | 95 | 1715 | CUUCAUUAUUGGAACAAAA | 522 |
| 1711 | GAGUCCUUUAUCCUGGAUG | 96 | 1711 | GAGUCCUUUAUCCUGGAUG | 96 | 1733 | CAUCCAGGAUAAAGGACUC | 523 |
| 1729 | GCUGACAGCAACAUGGGAA | 97 | 1729 | GCUGACAGCAACAUGGGAA | 97 | 1751 | UUCCCAUGUUGCUGUCAGC | 524 |
| 1747 | AACAGAAUUGAGAGCAUCA | 98 | 1747 | AACAGAAUUGAGAGCAUCA | 98 | 1769 | UGAUGCUCUCAAUUCUGUU | 525 |
| 1765 | ACUCAGCGCAUGGCAAUAA | 99 | 1765 | ACUCAGCGCAUGGCAAUAA | 99 | 1787 | UUAUUGCCAUGCGCUGAGU | 526 |
| 1783 | AUAGAAGGAAAGAAUAAGA | 100 | 1783 | AUAGAAGGAAAGAAUAAGA | 100 | 1805 | UCUUAUUCUUUCCUUCUAU | 527 |
| 1801 | AUGGCUAGCACCUUGGUUG | 101 | 1801 | AUGGCUAGCACCUUGGUUG | 101 | 1823 | CAACCAAGGUGCUAGCCAU | 528 |
| 1819 | GUGGCUGACUCUAGAAUUU | 102 | 1819 | GUGGCUGACUCUAGAAUUU | 102 | 1841 | AAAUUCUAGAGUCAGCCAC | 529 |
| 1837 | UCUGGAAUCUACAUUUGCA | 103 | 1837 | UCUGGAAUCUACAUUUGCA | 103 | 1859 | UGCAAAUGUAGAUUCCAGA | 530 |
| 1855 | AUAGCUUCCAAUAAAGUUG | 104 | 1855 | AUAGCUUCCAAUAAAGUUG | 104 | 1877 | CAACUUUAUUGGAAGCUAU | 531 |
| 1873 | GGGACUGUGGGAAGAAACA | 105 | 1873 | GGGACUGUGGGAAGAAACA | 105 | 1895 | UGUUUCUUCCCACAGUCCC | 532 |
| 1891 | AUAAGCUUUUAUAUCACAG | 106 | 1891 | AUAAGCUUUUAUAUCACAG | 106 | 1913 | CUGUGAUAUAAAAGCUUAU | 533 |
| 1909 | GAUGUGCCAAAUGGGUUUC | 107 | 1909 | GAUGUGCCAAAUGGGUUUC | 107 | 1931 | GAAACCCAUUUGGCACAUC | 534 |
| 1927 | CAUGUUAACUUGGAAAAAA | 108 | 1927 | CAUGUUAACUUGGAAAAAA | 108 | 1949 | UUUUUUCCAAGUUAACAUG | 535 |
| 1945 | AUGCCGACGGAAGGAGAGG | 109 | 1945 | AUGCCGACGGAAGGAGAGG | 109 | 1967 | CCUCUCCUUCCGUCGGCAU | 536 |
| 1963 | GACCUGAAACUGUCUUGCA | 110 | 1963 | GACCUGAAACUGUCUUGCA | 110 | 1985 | UGCAAGACAGUUUCAGGUC | 537 |
| 1981 | ACAGUUAACAAGUUCUUAU | 111 | 1981 | ACAGUUAACAAGUUCUUAU | 111 | 2003 | AUAAGAACUUGUUAACUGU | 538 |
| 1999 | UACAGAGACGUUACUUGGA | 112 | 1999 | UACAGAGACGUUACUUGGA | 112 | 2021 | UCCAAGUAACGUCUCUGUA | 539 |
| 2017 | AUUUUACUGCGGACAGUUA | 113 | 2017 | AUUUUACUGCGGACAGUUA | 113 | 2039 | UAACUGUCCGCAGUAAAAU | 540 |
| 2035 | AAUAACAGAACAAUGCACU | 114 | 2035 | AAUAACAGAACAAUGCACU | 114 | 2057 | AGUGCAUUGUUCUGUUAUU | 541 |
| 2053 | UACAGUAUUAGCAAGCAAA | 115 | 2053 | UACAGUAUUAGCAAGCAAA | 115 | 2075 | UUUGCUUGCUAAUACUGUA | 542 |
| 2071 | AAAAUGGCCAUCACUAAGG | 116 | 2071 | AAAAUGGCCAUCACUAAGG | 116 | 2093 | CCUUAGUGAUGGCCAUUUU | 543 |
| 2089 | GAGCACUCCAUCACUCUUA | 117 | 2089 | GAGCACUCCAUCACUCUUA | 117 | 2111 | UAAGAGUGAUGGAGUGCUC | 544 |
| 2107 | AAUCUUACCAUCAUGAAUG | 118 | 2107 | AAUCUUACCAUCAUGAAUG | 118 | 2129 | CAUUCAUGAUGGUAAGAUU | 545 |
| 2125 | GUUUCCCUGCAAGAUUCAG | 119 | 2125 | GUUUCCCUGCAAGAUUCAG | 119 | 2147 | CUGAAUCUUGCAGGGAAAC | 546 |
| 2143 | GGCACCUAUGCCUGCAGAG | 120 | 2143 | GGCACCUAUGCCUGCAGAG | 120 | 2165 | CUCUGCAGGCAUAGGUGCC | 547 |
| 2161 | GCCAGGAAUGUAUACACAG | 121 | 2161 | GCCAGGAAUGUAUACACAG | 121 | 2183 | CUGUGUAUACAUUCCUGGC | 548 |
| 2179 | GGGGAAGAAAUCCUCCAGA | 122 | 2179 | GGGGAAGAAAUCCUCCAGA | 122 | 2201 | UCUGGAGGAUUUCUUCCCC | 549 |
| 2197 | AAGAAAGAAAUUACAAUCA | 123 | 2197 | AAGAAAGAAAUUACAAUCA | 123 | 2219 | UGAUUGUAAUUUCUUUCUU | 550 |
| 2215 | AGAGAUCAGGAAGCACCAU | 124 | 2215 | AGAGAUCAGGAAGCACCAU | 124 | 2237 | AUGGUGCUUCCUGAUCUCU | 551 |
| 2233 | UACCUCCUGCGAAACCUCA | 125 | 2233 | UACCUCCUGCGAAACCUCA | 125 | 2255 | UGAGGUUUCGCAGGAGGUA | 552 |
| 2251 | AGUGAUCACACAGUGGCCA | 126 | 2251 | AGUGAUCACACAGUGGCCA | 126 | 2273 | UGGCCACUGUGUGAUCACU | 553 |
| 2269 | AUCAGCAGUUCCACCACUU | 127 | 2269 | AUCAGCAGUUCCACCACUU | 127 | 2291 | AAGUGGUGGAACUGCUGAU | 554 |
| 2287 | UUAGACUGUCAUGCUAAUG | 128 | 2287 | UUAGACUGUCAUGCUAAUG | 128 | 2309 | CAUUAGCAUGACAGUCUAA | 555 |
| 2305 | GGUGUCCCCGAGCCUCAGA | 129 | 2305 | GGUGUCCCCGAGCCUCAGA | 129 | 2327 | UCUGAGGCUCGGGGACACC | 556 |
| 2323 | AUCACUUGGUUUAAAAACA | 130 | 2323 | AUCACUUGGUUUAAAAACA | 130 | 2345 | UGUUUUUAAACCAAGUGAU | 557 |
| 2341 | AACCACAAAAUACAACAAG | 131 | 2341 | AACCACAAAAUACAACAAG | 131 | 2363 | CUUGUUGUAUUUUGUGGUU | 558 |
| 2359 | GAGCCUGGAAUUAUUUUAG | 132 | 2359 | GAGCCUGGAAUUAUUUUAG | 132 | 2381 | CUAAAAUAAUUCCAGGCUC | 559 |
| 2377 | GGACCAGGAAGCAGCACGC | 133 | 2377 | GGACCAGGAAGCAGCACGC | 133 | 2399 | GCGUGCUGCUUCCUGGUCC | 560 |
| 2395 | CUGUUUAUUGAAAGAGUCA | 134 | 2395 | CUGUUUAUUGAAAGAGUCA | 134 | 2417 | UGACUCUUUCAAUAAACAG | 561 |
| 2413 | ACAGAAGAGGAUGAAGGUG | 135 | 2413 | ACAGAAGAGGAUGAAGGUG | 135 | 2435 | CACCUUCAUCCUCUUCUGU | 562 |
| 2431 | GUCUAUCACUGCAAAGCCA | 136 | 2431 | GUCUAUCACUGCAAAGCCA | 136 | 2453 | UGGCUUUGCAGUGAUAGAC | 563 |
| 2449 | ACCAACCAGAAGGGCUCUG | 137 | 2449 | ACCAACCAGAAGGGCUCUG | 137 | 2471 | CAGAGCCCUUCUGGUUGGU | 564 |
| 2467 | GUGGAAAGUUCAGCAUACC | 138 | 2467 | GUGGAAAGUUCAGCAUACC | 138 | 2489 | GGUAUGCUGAACUUUCCAC | 565 |
| 2485 | CUCACUGUUCAAGGAACCU | 139 | 2485 | CUCACUGUUCAAGGAACCU | 139 | 2507 | AGGUUCCUUGAACAGUGAG | 566 |
| 2503 | UCGGACAAGUCUAAUCUGG | 140 | 2503 | UCGGACAAGUCUAAUCUGG | 140 | 2525 | CCAGAUUAGACUUGUCCGA | 567 |
| 2521 | GAGCUGAUCACUCUAACAU | 141 | 2521 | GAGCUGAUCACUCUAACAU | 141 | 2543 | AUGUUAGAGUGAUCAGCUC | 568 |
| 2539 | UGCACCUGUGUGGCUGCGA | 142 | 2539 | UGCACCUGUGUGGCUGCGA | 142 | 2561 | UCGCAGCCACACAGGUGCA | 569 |
| 2557 | ACUCUCUUCUGGCUCCUAU | 143 | 2557 | ACUCUCUUCUGGCUCCUAU | 143 | 2579 | AUAGGAGCCAGAAGAGAGU | 570 |
| 2575 | UUAACCCUCCUUAUCCGAA | 144 | 2575 | UUAACCCUCCUUAUCCGAA | 144 | 2597 | UUCGGAUAAGGAGGGUUAA | 571 |
| 2593 | AAAAUGAAAAGGUCUUCUU | 145 | 2593 | AAAAUGAAAAGGUCUUCUU | 145 | 2615 | AAGAAGACCUUUUCAUUUU | 572 |
| 2611 | UCUGAAAUAAAGACUGACU | 146 | 2611 | UCUGAAAUAAAGACUGACU | 146 | 2633 | AGUCAGUCUUUAUUUCAGA | 573 |
| 2629 | UACCUAUCAAUUAUAAUGG | 147 | 2629 | UACCUAUCAAUUAUAAUGG | 147 | 2651 | CCAUUAUAAUUGAUAGGUA | 574 |
| 2647 | GACCCAGAUGAAGUUCCUU | 148 | 2647 | GACCCAGAUGAAGUUCCUU | 148 | 2669 | AAGGAACUUCAUCUGGGUC | 575 |
| 2665 | UUGGAUGAGCAGUGUGAGC | 149 | 2665 | UUGGAUGAGCAGUGUGAGC | 149 | 2687 | GCUCACACUGCUCAUCCAA | 576 |
| 2683 | CGGCUCCCUUAUGAUGCCA | 150 | 2683 | CGGCUCCCUUAUGAUGCCA | 150 | 2705 | UGGCAUCAUAAGGGAGCCG | 577 |
| 2701 | AGCAAGUGGGAGUUUGCCC | 151 | 2701 | AGCAAGUGGGAGUUUGCCC | 151 | 2723 | GGGCAAACUCCCACUUGCU | 578 |
| 2719 | CGGGAGAGACUUAAACUGG | 152 | 2719 | CGGGAGAGACUUAAACUGG | 152 | 2741 | CCAGUUUAAGUCUCUCCCG | 579 |
| 2737 | GGCAAAUCACUUGGAAGAG | 153 | 2737 | GGCAAAUCACUUGGAAGAG | 153 | 2759 | CUCUUCCAAGUGAUUUGCC | 580 |
| 2755 | GGGGCUUUUGGAAAAGUGG | 154 | 2755 | GGGGCUUUUGGAAAAGUGG | 154 | 2777 | CCACUUUUCCAAAAGCCCC | 581 |
| 2773 | GUUCAAGCAUCAGCAUUUG | 155 | 2773 | GUUCAAGCAUCAGCAUUUG | 155 | 2795 | CAAAUGCUGAUGCUUGAAC | 582 |
| 2791 | GGCAUUAAGAAAUCACCUA | 156 | 2791 | GGCAUUAAGAAAUCACCUA | 156 | 2813 | UAGGUGAUUUCUUAAUGCC | 583 |
| 2809 | ACGUGCCGGACUGUGGCUG | 157 | 2809 | ACGUGCCGGACUGUGGCUG | 157 | 2831 | CAGCCACAGUCCGGCACGU | 584 |
| 2827 | GUGAAAAUGCUGAAAGAGG | 158 | 2827 | GUGAAAAUGCUGAAAGAGG | 158 | 2849 | CCUCUUUCAGCAUUUUCAC | 585 |
| 2845 | GGGGCCACGGCCAGCGAGU | 159 | 2845 | GGGGCCACGGCCAGCGAGU | 159 | 2867 | ACUCGCUGGCCGUGGCCCC | 586 |
| 2863 | UACAAAGCUCUGAUGACUG | 160 | 2863 | UACAAAGCUCUGAUGACUG | 160 | 2885 | CAGUCAUCAGAGCUUUGUA | 587 |
| 2881 | GAGCUAAAAAUCUUGACCC | 161 | 2881 | GAGCUAAAAAUCUUGACCC | 161 | 2903 | GGGUCAAGAUUUUUAGCUC | 588 |
| 2899 | CACAUUGGCCACCAUCUGA | 162 | 2899 | CACAUUGGCCACCAUCUGA | 162 | 2921 | UCAGAUGGUGGCCAAUGUG | 589 |
| 2917 | AACGUGGUUAACCUGCUGG | 163 | 2917 | AACGUGGUUAACCUGCUGG | 163 | 2939 | CCAGCAGGUUAACCACGUU | 590 |
| 2935 | GGAGCCUGCACCAAGCAAG | 164 | 2935 | GGAGCCUGCACCAAGCAAG | 164 | 2957 | CUUGCUUGGUGCAGGCUCC | 591 |
| 2953 | GGAGGGCCUCUGAUGGUGA | 165 | 2953 | GGAGGGCCUCUGAUGGUGA | 165 | 2975 | UCACCAUCAGAGGCCCUCC | 592 |
| 2971 | AUUGUUGAAUACUGCAAAU | 166 | 2971 | AUUGUUGAAUACUGCAAAU | 166 | 2993 | AUUUGCAGUAUUCAACAAU | 593 |
| 2989 | UAUGGAAAUCUCUCCAACU | 167 | 2989 | UAUGGAAAUCUCUCCAACU | 167 | 3011 | AGUUGGAGAGAUUUCCAUA | 594 |
| 3007 | UACCUCAAGAGCAAACGUG | 168 | 3007 | UACCUCAAGAGCAAACGUG | 168 | 3029 | CACGUUUGCUCUUGAGGUA | 595 |
| 3025 | GACUUAUUUUUUCUCAACA | 169 | 3025 | GACUUAUUUUUUCUCAACA | 169 | 3047 | UGUUGAGAAAAAAUAAGUC | 596 |
| 3043 | AAGGAUGCAGCACUACACA | 170 | 3043 | AAGGAUGCAGCACUACACA | 170 | 3065 | UGUGUAGUGCUGCAUCCUU | 597 |
| 3061 | AUGGAGCCUAAGAAAGAAA | 171 | 3061 | AUGGAGCCUAAGAAAGAAA | 171 | 3083 | UUUCUUUCUUAGGCUCCAU | 598 |
| 3079 | AAAAUGGAGCCAGGCCUGG | 172 | 3079 | AAAAUGGAGCCAGGCCUGG | 172 | 3101 | CCAGGCCUGGCUCCAUUUU | 599 |
| 3097 | GAACAAGGCAAGAAACCAA | 173 | 3097 | GAACAAGGCAAGAAACCAA | 173 | 3119 | UUGGUUUCUUGCCUUGUUC | 600 |
| 3115 | AGACUAGAUAGCGUCACCA | 174 | 3115 | AGACUAGAUAGCGUCACCA | 174 | 3137 | UGGUGACGCUAUCUAGUCU | 601 |
| 3133 | AGCAGCGAAAGCUUUGCGA | 175 | 3133 | AGCAGCGAAAGCUUUGCGA | 175 | 3155 | UCGCAAAGCUUUCGCUGCU | 602 |
| 3151 | AGCUCCGGCUUUCAGGAAG | 176 | 3151 | AGCUCCGGCUUUCAGGAAG | 176 | 3173 | CUUCCUGAAAGCCGGAGCU | 603 |
| 3169 | GAUAAAAGUCUGAGUGAUG | 177 | 3169 | GAUAAAAGUCUGAGUGAUG | 177 | 3191 | CAUCACUCAGACUUUUAUC | 604 |
| 3187 | GUUGAGGAAGAGGAGGAUU | 178 | 3187 | GUUGAGGAAGAGGAGGAUU | 178 | 3209 | AAUCCUCCUCUUCCUCAAC | 605 |
| 3205 | UCUGACGGUUUCUACAAGG | 179 | 3205 | UCUGACGGUUUCUACAAGG | 179 | 3227 | CCUUGUAGAAACCGUCAGA | 606 |
| 3223 | GAGCCCAUCACUAUGGAAG | 180 | 3223 | GAGCCCAUCACUAUGGAAG | 180 | 3245 | CUUCCAUAGUGAUGGGCUC | 607 |
| 3241 | GAUCUGAUUUCUUACAGUU | 181 | 3241 | GAUCUGAUUUCUUACAGUU | 181 | 3263 | AACUGUAAGAAAUCAGAUC | 608 |
| 3259 | UUUCAAGUGGCCAGAGGCA | 182 | 3259 | UUUCAAGUGGCCAGAGGCA | 182 | 3281 | UGCCUCUGGCCACUUGAAA | 609 |
| 3277 | AUGGAGUUCCUGUCUUCCA | 183 | 3277 | AUGGAGUUCCUGUCUUCCA | 183 | 3299 | UGGAAGACAGGAACUCCAU | 610 |
| 3295 | AGAAAGUGCAUUCAUCGGG | 184 | 3295 | AGAAAGUGCAUUCAUCGGG | 184 | 3317 | CCCGAUGAAUGCACUUUCU | 611 |
| 3313 | GACCUGGCAGCGAGAAACA | 185 | 3313 | GACCUGGCAGCGAGAAACA | 185 | 3335 | UGUUUCUCGCUGCCAGGUC | 612 |
| 3331 | AUUCUUUUAUCUGAGAACA | 186 | 3331 | AUUCUUUUAUCUGAGAACA | 186 | 3353 | UGUUCUCAGAUAAAAGAAU | 613 |
| 3349 | AACGUGGUGAAGAUUUGUG | 187 | 3349 | AACGUGGUGAAGAUUUGUG | 187 | 3371 | CACAAAUCUUCACCACGUU | 614 |
| 3367 | GAUUUUGGCCUUGCCCGGG | 188 | 3367 | GAUUUUGGCCUUGCCCGGG | 188 | 3389 | CCCGGGCAAGGCCAAAAUC | 615 |
| 3385 | GAUAUUUAUAAGAACCCCG | 189 | 3385 | GAUAUUUAUAAGAACCCCG | 189 | 3407 | CGGGGUUCUUAUAAAUAUC | 616 |
| 3403 | GAUUAUGUGAGAAAAGGAG | 190 | 3403 | GAUUAUGUGAGAAAAGGAG | 190 | 3425 | CUCCUUUUCUCACAUAAUC | 617 |
| 3421 | GAUACUCGACUUCCUCUGA | 191 | 3421 | GAUACUCGACUUCCUCUGA | 191 | 3443 | UCAGAGGAAGUCGAGUAUC | 618 |
| 3439 | AAAUGGAUGGCUCCCGAAU | 192 | 3439 | AAAUGGAUGGCUCCCGAAU | 192 | 3461 | AUUCGGGAGCCAUCCAUUU | 619 |
| 3457 | UCUAUCUUUGACAAAAUCU | 193 | 3457 | UCUAUCUUUGACAAAAUCU | 193 | 3479 | AGAUUUUGUCAAAGAUAGA | 620 |
| 3475 | UACAGCACCAAGAGCGACG | 194 | 3475 | UACAGCACCAAGAGCGACG | 194 | 3497 | CGUCGCUCUUGGUGCUGUA | 621 |
| 3493 | GUGUGGUCUUACGGAGUAU | 195 | 3493 | GUGUGGUCUUACGGAGUAU | 195 | 3515 | AUACUCCGUAAGACCACAC | 622 |
| 3511 | UUGCUGUGGGAAAUCUUCU | 196 | 3511 | UUGCUGUGGGAAAUCUUCU | 196 | 3533 | AGAAGAUUUCCCACAGCAA | 623 |
| 3529 | UCCUUAGGUGGGUCUCCAU | 197 | 3529 | UCCUUAGGUGGGUCUCCAU | 197 | 3551 | AUGGAGACCCACCUAAGGA | 624 |
| 3547 | UACCCAGGAGUACAAAUGG | 198 | 3547 | UACCCAGGAGUACAAAUGG | 198 | 3569 | CCAUUUGUACUCCUGGGUA | 625 |
| 3565 | GAUGAGGACUUUUGCAGUC | 199 | 3565 | GAUGAGGACUUUUGCAGUC | 199 | 3587 | GACUGCAAAAGUCCUCAUC | 626 |
| 3583 | CGCCUGAGGGAAGGCAUGA | 200 | 3583 | CGCCUGAGGGAAGGCAUGA | 200 | 3605 | UCAUGCCUUCCCUCAGGCG | 627 |
| 3601 | AGGAUGAGAGCUCCUGAGU | 201 | 3601 | AGGAUGAGAGCUCCUGAGU | 201 | 3623 | ACUCAGGAGCUCUCAUCCU | 628 |
| 3619 | UACUCUACUCCUGAAAUCU | 202 | 3619 | UACUCUACUCCUGAAAUCU | 202 | 3641 | AGAUUUCAGGAGUAGAGUA | 629 |
| 3637 | UAUCAGAUCAUGCUGGACU | 203 | 3637 | UAUCAGAUCAUGCUGGACU | 203 | 3659 | AGUCCAGCAUGAUCUGAUA | 630 |
| 3655 | UGCUGGCACAGAGACCCAA | 204 | 3655 | UGCUGGCACAGAGACCCAA | 204 | 3677 | UUGGGUCUCUGUGCCAGCA | 631 |
| 3673 | AAAGAAAGGCCAAGAUUUG | 205 | 3673 | AAAGAAAGGCCAAGAUUUG | 205 | 3695 | CAAAUCUUGGCCUUUCUUU | 632 |
| 3691 | GCAGAACUUGUGGAAAAAC | 206 | 3691 | GCAGAACUUGUGGAAAAAC | 206 | 3713 | GUUUUUCCACAAGUUCUGC | 633 |
| 3709 | CUAGGUGAUUUGCUUCAAG | 207 | 3709 | CUAGGUGAUUUGCUUCAAG | 207 | 3731 | CUUGAAGCAAAUCACCUAG | 634 |
| 3727 | GCAAAUGUACAACAGGAUG | 208 | 3727 | GCAAAUGUACAACAGGAUG | 208 | 3749 | CAUCCUGUUGUACAUUUGC | 635 |
| 3745 | GGUAAAGACUACAUCCCAA | 209 | 3745 | GGUAAAGACUACAUCCCAA | 209 | 3767 | UUGGGAUGUAGUCUUUACC | 636 |
| 3763 | AUCAAUGCCAUACUGACAG | 210 | 3763 | AUCAAUGCCAUACUGACAG | 210 | 3785 | CUGUCAGUAUGGCAUUGAU | 637 |
| 3781 | GGAAAUAGUGGGUUUACAU | 211 | 3781 | GGAAAUAGUGGGUUUACAU | 211 | 3803 | AUGUAAACCCACUAUUUCC | 638 |
| 3799 | UACUCAACUCCUGCCUUCU | 212 | 3799 | UACUCAACUCCUGCCUUCU | 212 | 3821 | AGAAGGCAGGAGUUGAGUA | 639 |
| 3817 | UCUGAGGACUUCUUCAAGG | 213 | 3817 | UCUGAGGACUUCUUCAAGG | 213 | 3839 | CCUUGAAGAAGUCCUCAGA | 640 |
| 3835 | GAAAGUAUUUCAGCUCCGA | 214 | 3835 | GAAAGUAUUUCAGCUCCGA | 214 | 3857 | UCGGAGCUGAAAUACUUUC | 641 |
| 3853 | AAGUUUAAUUCAGGAAGCU | 215 | 3853 | AAGUUUAAUUCAGGAAGCU | 215 | 3875 | AGCUUCCUGAAUUAAACUU | 642 |
| 3871 | UCUGAUGAUGUCAGAUAUG | 216 | 3871 | UCUGAUGAUGUCAGAUAUG | 216 | 3893 | CAUAUCUGACAUCAUCAGA | 643 |
| 3889 | GUAAAUGCUUUCAAGUUCA | 217 | 3889 | GUAAAUGCUUUCAAGUUCA | 217 | 3911 | UGAACUUGAAAGCAUUUAC | 644 |
| 3907 | AUGAGCCUGGAAAGAAUCA | 218 | 3907 | AUGAGCCUGGAAAGAAUCA | 218 | 3929 | UGAUUCUUUCCAGGCUCAU | 645 |
| 3925 | AAAACCUUUGAAGAACUUU | 219 | 3925 | AAAACCUUUGAAGAACUUU | 219 | 3947 | AAAGUUCUUCAAAGGUUUU | 646 |
| 3943 | UUACCGAAUGCCACCUCCA | 220 | 3943 | UUACCGAAUGCCACCUCCA | 220 | 3965 | UGGAGGUGGCAUUCGGUAA | 647 |
| 3961 | AUGUUUGAUGACUACCAGG | 221 | 3961 | AUGUUUGAUGACUACCAGG | 221 | 3983 | CCUGGUAGUCAUCAAACAU | 648 |
| 3979 | GGCGACAGCAGCACUCUGU | 222 | 3979 | GGCGACAGCAGCACUCUGU | 222 | 4001 | ACAGAGUGCUGCUGUCGCC | 649 |
| 3997 | UUGGCCUCUCCCAUGCUGA | 223 | 3997 | UUGGCCUCUCCCAUGCUGA | 223 | 4019 | UCAGCAUGGGAGAGGCCAA | 650 |
| 4015 | AAGCGCUUCACCUGGACUG | 224 | 4015 | AAGCGCUUCACCUGGACUG | 224 | 4037 | CAGUCCAGGUGAAGCGCUU | 651 |
| 4033 | GACAGCAAACCCAAGGCCU | 225 | 4033 | GACAGCAAACCCAAGGCCU | 225 | 4055 | AGGCCUUGGGUUUGCUGUC | 652 |
| 4051 | UCGCUCAAGAUUGACUUGA | 226 | 4051 | UCGCUCAAGAUUGACUUGA | 226 | 4073 | UCAAGUCAAUCUUGAGCGA | 653 |
| 4069 | AGAGUAACCAGUAAAAGUA | 227 | 4069 | AGAGUAACCAGUAAAAGUA | 227 | 4091 | UACUUUUACUGGUUACUCU | 654 |
| 4087 | AAGGAGUCGGGGCUGUCUG | 228 | 4087 | AAGGAGUCGGGGCUGUCUG | 228 | 4109 | CAGACAGCCCCGACUCCUU | 655 |
| 4105 | GAUGUCAGCAGGCCCAGUU | 229 | 4105 | GAUGUCAGCAGGCCCAGUU | 229 | 4127 | AACUGGGCCUGCUGACAUC | 656 |
| 4123 | UUCUGCCAUUCCAGCUGUG | 230 | 4123 | UUCUGCCAUUCCAGCUGUG | 230 | 4145 | CACAGCUGGAAUGGCAGAA | 657 |
| 4141 | GGGCACGUCAGCGAAGGCA | 231 | 4141 | GGGCACGUCAGCGAAGGCA | 231 | 4163 | UGCCUUCGCUGACGUGCCC | 658 |
| 4159 | AAGCGCAGGUUCACCUACG | 232 | 4159 | AAGCGCAGGUUCACCUACG | 232 | 4181 | CGUAGGUGAACCUGCGCUU | 659 |
| 4177 | GACCACGCUGAGCUGGAAA | 233 | 4177 | GACCACGCUGAGCUGGAAA | 233 | 4199 | UUUCCAGCUCAGCGUGGUC | 660 |
| 4195 | AGGAAAAUCGCGUGCUGCU | 234 | 4195 | AGGAAAAUCGCGUGCUGCU | 234 | 4217 | AGCAGCACGCGAUUUUCCU | 661 |
| 4213 | UCCCCGCCCCCAGACUACA | 235 | 4213 | UCCCCGCCCCCAGACUACA | 235 | 4235 | UGUAGUCUGGGGGCGGGGA | 662 |
| 4231 | AACUCGGUGGUCCUGUACU | 236 | 4231 | AACUCGGUGGUCCUGUACU | 236 | 4253 | AGUACAGGACCACCGAGUU | 663 |
| 4249 | UCCACCCCACCCAUCUAGA | 237 | 4249 | UCCACCCCACCCAUCUAGA | 237 | 4271 | UCUAGAUGGGUGGGGUGGA | 664 |
| 4267 | AGUUUGACACGAAGCCUUA | 238 | 4267 | AGUUUGACACGAAGCCUUA | 238 | 4289 | UAAGGCUUCGUGUCAAACU | 665 |
| 4285 | AUUUCUAGAAGCACAUGUG | 239 | 4285 | AUUUCUAGAAGCACAUGUG | 239 | 4307 | CACAUGUGCUUCUAGAAAU | 666 |
| 4303 | GUAUUUAUACCCCCAGGAA | 240 | 4303 | GUAUUUAUACCCCCAGGAA | 240 | 4325 | UUCCUGGGGGUAUAAAUAC | 667 |
| 4321 | AACUAGCUUUUGCCAGUAU | 241 | 4321 | AACUAGCUUUUGCCAGUAU | 241 | 4343 | AUACUGGCAAAAGCUAGUU | 668 |
| 4339 | UUAUGCAUAUAUAAGUUUA | 242 | 4339 | UUAUGCAUAUAUAAGUUUA | 242 | 4361 | UAAACUUAUAUAUGCAUAA | 669 |
| 4357 | ACACCUUUAUCUUUCCAUG | 243 | 4357 | ACACCUUUAUCUUUCCAUG | 243 | 4379 | CAUGGAAAGAUAAAGGUGU | 670 |
| 4375 | GGGAGCCAGCUGCUUUUUG | 244 | 4375 | GGGAGCCAGCUGCUUUUUG | 244 | 4397 | CAAAAAGCAGCUGGCUCCC | 671 |
| 4393 | GUGAUUUUUUUAAUAGUGC | 245 | 4393 | GUGAUUUUUUUAAUAGUGC | 245 | 4415 | GCACUAUUAAAAAAAUCAC | 672 |
| 4411 | CUUUUUUUUUUUGACUAAC | 246 | 4411 | CUUUUUUUUUUUGACUAAC | 246 | 4433 | GUUAGUCAAAAAAAAAAAG | 673 |
| 4429 | CAAGAAUGUAACUCCAGAU | 247 | 4429 | CAAGAAUGUAACUCCAGAU | 247 | 4451 | AUCUGGAGUUACAUUCUUG | 674 |
| 4447 | UAGAGAAAUAGUGACAAGU | 248 | 4447 | UAGAGAAAUAGUGACAAGU | 248 | 4469 | ACUUGUCAGUAUUUCUCUA | 675 |
| 4465 | UGAAGAACACUACUGCUAA | 249 | 4465 | UGAAGAACACUACUGCUAA | 249 | 4487 | UUAGCAGUAGUGUUCUUCA | 676 |
| 4483 | AAUCCUCAUGUUACUCAGU | 250 | 4483 | AAUCCUCAUGUUACUCAGU | 250 | 4505 | ACUGAGUAACAUGAGGAUU | 677 |
| 4501 | UGUUAGAGAAAUCCUUCCU | 251 | 4501 | UGUUAGAGAAAUCCUUCCU | 251 | 4523 | AGGAAGGAUUUCUCUAACA | 678 |
| 4519 | UAAACCCAAUGACUUCCCU | 252 | 4519 | UAAACCCAAUGACUUCCCU | 252 | 4541 | AGGGAAGUCAUUGGGUUUA | 679 |
| 4537 | UGCUCCAACCCCCGCCACC | 253 | 4537 | UGCUCCAACCCCCGCCACC | 253 | 4559 | GGUGGCGGGGGUUGGAGCA | 680 |
| 4555 | CUCAGGGCACGCAGGACCA | 254 | 4555 | CUCAGGGCACGCAGGACCA | 254 | 4577 | UGGUCCUGCGUGCCCUGAG | 681 |
| 4573 | AGUUUGAUUGAGGAGCUGC | 255 | 4573 | AGUUUGAUUGAGGAGCUGC | 255 | 4595 | GCAGCUCCUCAAUCAAACU | 682 |
| 4591 | CACUGAUCACCCAAUGCAU | 256 | 4591 | CACUGAUCACCCAAUGCAU | 256 | 4613 | AUGCAUUGGGUGAUCAGUG | 683 |
| 4609 | UCACGUACCCCACUGGGCC | 257 | 4609 | UCACGUACCCCACUGGGCC | 257 | 4631 | GGCCCAGUGGGGUACGUGA | 684 |
| 4627 | CAGCCCUGCAGCCCAAAAC | 258 | 4627 | CAGCCCUGCAGCCCAAAAC | 258 | 4649 | GUUUUGGGCUGCAGGGCUG | 685 |
| 4645 | CCCAGGGCAACAAGCCCGU | 259 | 4645 | CCCAGGGCAACAAGCCCGU | 259 | 4667 | ACGGGCUUGUUGCCCUGGG | 686 |
| 4663 | UUAGCCCCAGGGGAUCACU | 260 | 4663 | UUAGCCCCAGGGGAUCACU | 260 | 4685 | AGUGAUCCCCUGGGGCUAA | 687 |
| 4681 | UGGCUGGCCUGAGCAACAU | 261 | 4681 | UGGCUGGCCUGAGCAACAU | 261 | 4703 | AUGUUGCUCAGGCCAGCCA | 688 |
| 4699 | UCUCGGGAGUCCUCUAGCA | 262 | 4699 | UCUCGGGAGUCCUCUAGCA | 262 | 4721 | UGCUAGAGGACUCCCGAGA | 689 |
| 4717 | AGGCCUAAGACAUGUGAGG | 263 | 4717 | AGGCCUAAGACAUGUGAGG | 263 | 4739 | CCUCACAUGUCUUAGGCCU | 690 |
| 4735 | GAGGAAAAGGAAAAAAAGC | 264 | 4735 | GAGGAAAAGGAAAAAAAGC | 264 | 4757 | GCUUUUUUUCCUUUUCCUC | 691 |
| 4753 | CAAAAAGCAAGGGAGAAAA | 265 | 4753 | CAAAAAGCAAGGGAGAAAA | 265 | 4775 | UUUUCUCCCUUGCUUUUUG | 692 |
| 4771 | AGAGAAACCGGGAGAAGGC | 266 | 4771 | AGAGAAACCGGGAGAAGGC | 266 | 4793 | GCCUUCUCCCGGUUUCUCU | 693 |
| 4789 | CAUGAGAAAGAAUUUGAGA | 267 | 4789 | CAUGAGAAAGAAUUUGAGA | 267 | 4811 | UCUCAAAUUCUUUCUCAUG | 694 |
| 4807 | ACGCACCAUGUGGGCACGG | 268 | 4807 | ACGCACCAUGUGGGCACGG | 268 | 4829 | CCGUGCCCACAUGGUGCGU | 695 |
| 4825 | GAGGGGGACGGGGCUCAGC | 269 | 4825 | GAGGGGGACGGGGCUCAGC | 269 | 4847 | GCUGAGCCCCGUCCCCCUC | 696 |
| 4843 | CAAUGCCAUUUCAGUGGCU | 270 | 4843 | CAAUGCCAUUUCAGUGGCU | 270 | 4865 | AGCCACUGAAAUGGCAUUG | 697 |
| 4861 | UUCCCAGCUCUGACCCUUC | 271 | 4861 | UUCCCAGCUCUGACCCUUC | 271 | 4883 | GAAGGGUCAGAGCUGGGAA | 698 |
| 4879 | CUACAUUUGAGGGCCCAGC | 272 | 4879 | CUACAUUUGAGGGCCCAGC | 272 | 4901 | GCUGGGCCCUCAAAUGUAG | 699 |
| 4897 | CCAGGAGCAGAUGGACAGC | 273 | 4897 | CCAGGAGCAGAUGGACAGC | 273 | 4919 | GCUGUCCAUCUGCUCCUGG | 700 |
| 4915 | CGAUGAGGGGACAUUUUCU | 274 | 4915 | CGAUGAGGGGACAUUUUCU | 274 | 4937 | AGAAAAUGUCCCCUCAUCG | 701 |
| 4933 | UGGAUUCUGGGAGGCAAGA | 275 | 4933 | UGGAUUCUGGGAGGCAAGA | 275 | 4955 | UCUUGCCUCCCAGAAUCCA | 702 |
| 4951 | AAAAGGACAAAUAUCUUUU | 276 | 4951 | AAAAGGACAAAUAUCUUUU | 276 | 4973 | AAAAGAUAUUUGUCCUUUU | 703 |
| 4969 | UUUGGAACUAAAGCAAAUU | 277 | 4969 | UUUGGAACUAAAGCAAAUU | 277 | 4991 | AAUUUGCUUUAGUUCCAAA | 704 |
| 4987 | UUUAGACCUUUACCUAUGG | 278 | 4987 | UUUAGACCUUUACCUAUGG | 278 | 5009 | CCAUAGGUAAAGGUCUAAA | 705 |
| 5005 | GAAGUGGUUCUAUGUCCAU | 279 | 5005 | GAAGUGGUUCUAUGUCCAU | 279 | 5027 | AUGGACAUAGAACCACUUC | 706 |
| 5023 | UUCUCAUUCGUGGCAUGUU | 280 | 5023 | UUCUCAUUCGUGGCAUGUU | 280 | 5045 | AACAUGCCACGAAUGAGAA | 707 |
| 5041 | UUUGAUUUGUAGCACUGAG | 281 | 5041 | UUUGAUUUGUAGCACUGAG | 281 | 5063 | CUCAGUGCUACAAAUCAAA | 708 |
| 5059 | GGGUGGCACUCAACUCUGA | 282 | 5059 | GGGUGGCACUCAACUCUGA | 282 | 5081 | UCAGAGUUGAGUGCCACCC | 709 |
| 5077 | AGCCCAUACUUUUGGCUCC | 283 | 5077 | AGCCCAUACUUUUGGCUCC | 283 | 5099 | GGAGCCAAAAGUAUGGGCU | 710 |
| 5095 | CUCUAGUAAGAUGCACUGA | 284 | 5095 | CUCUAGUAAGAUGCACUGA | 284 | 5117 | UCAGUGCAUCUUACUAGAG | 711 |
| 5113 | AAAACUUAGCCAGAGUUAG | 285 | 5113 | AAAACUUAGCCAGAGUUAG | 285 | 5135 | CUAACUCUGGCUAAGUUUU | 712 |
| 5131 | GGUUGUCUCCAGGCCAUGA | 286 | 5131 | GGUUGUCUCCAGGCCAUGA | 286 | 5153 | UCAUGGCCUGGAGACAACC | 713 |
| 5149 | AUGGCCUUACACUGAAAAU | 287 | 5149 | AUGGCCUUACACUGAAAAU | 287 | 5171 | AUUUUCAGUGUAAGGCCAU | 714 |
| 5167 | UGUCACAUUCUAUUUUGGG | 288 | 5167 | UGUCACAUUCUAUUUUGGG | 288 | 5189 | CCCAAAAUAGAAUGUGACA | 715 |
| 5185 | GUAUUAAUAUAUAGUCCAG | 289 | 5185 | GUAUUAAUAUAUAGUCCAG | 289 | 5207 | CUGGACUAUAUAUUAAUAC | 716 |
| 5203 | GACACUUAACUCAAUUUCU | 290 | 5203 | GACACUUAACUCAAUUUCU | 290 | 5225 | AGAAAUUGAGUUAAGUGUC | 717 |
| 5221 | UUGGUAUUAUUCUGUUUUG | 291 | 5221 | UUGGUAUUAUUCUGUUUUG | 291 | 5243 | CAAAACAGAAUAAUACCAA | 718 |
| 5239 | GCACAGUUAGUUGUGAAAG | 292 | 5239 | GCACAGUUAGUUGUGAAAG | 292 | 5261 | CUUUCACAACUAACUGUGC | 719 |
| 5257 | GAAAGCUGAGAAGAAUGAA | 293 | 5257 | GAAAGCUGAGAAGAAUGAA | 293 | 5279 | UUCAUUCUUCUCAGCUUUC | 720 |
| 5275 | AAAUGCAGUCCUGAGGAGA | 294 | 5275 | AAAUGCAGUCCUGAGGAGA | 294 | 5297 | UCUCCUCAGGACUGCAUUU | 721 |
| 5293 | AGUUUUCUCCAUAUCAAAA | 295 | 5293 | AGUUUUCUCCAUAUCAAAA | 295 | 5315 | UUUUGAUAUGGAGAAAACU | 722 |
| 5311 | ACGAGGGCUGAUGGAGGAA | 296 | 5311 | ACGAGGGCUGAUGGAGGAA | 296 | 5333 | UUCCUCCAUCAGCCCUCGU | 723 |
| 5329 | AAAAGGUCAAUAAGGUCPA | 297 | 5329 | AAAAGGUCAAUAAGGUCAA | 297 | 5351 | UUGACCUUAUUGACCUUUU | 724 |
| 5347 | AGGGAAGACCCCGUCUCUA | 298 | 5347 | AGGGAAGACCCCGUCUCUA | 298 | 5369 | UAGAGACGGGGUCUUCCCU | 725 |
| 5365 | AUACCAACCAAACCAAUUC | 299 | 5365 | AUACCAACCAAACCAAUUC | 299 | 5387 | GAAUUGGUUUGGUUGGUAU | 726 |
| 5383 | CACCAACACAGUUGGGACC | 300 | 5383 | CACCAACACAGUUGGGACC | 300 | 5405 | GGUCCCAACUGUGUUGGUG | 727 |
| 5401 | CCAAAACACAGGAAGUCAG | 301 | 5401 | CCAAAACACAGGAAGUCAG | 301 | 5423 | CUGACUUCCUGUGUUUUGG | 728 |
| 5419 | GUCACGUUUCCUUUUCAUU | 302 | 5419 | GUCACGUUUCCUUUUCAUU | 302 | 5441 | AAUGAAAAGGAAACGUGAC | 729 |
| 5437 | UUAAUGGGGAUUCCACUAU | 303 | 5437 | UUAAUGGGGAUUCCACUAU | 303 | 5459 | AUAGUGGAAUCCCCAUUAA | 730 |
| 5455 | UCUCACACUAAUCUGAAAG | 304 | 5455 | UCUCACACUAAUCUGAAAG | 304 | 5477 | CUUUCAGAUUAGUGUGAGA | 731 |
| 5473 | GGAUGUGGAAGAGCAUUAG | 305 | 5473 | GGAUGUGGAAGAGCAUUAG | 305 | 5495 | CUAAUGCUCUUCCACAUCC | 732 |
| 5491 | GCUGGCGCAUAUUAAGCAC | 306 | 5491 | GCUGGCGCAUAUUAAGCAC | 306 | 5513 | GUGCUUAAUAUGCGCCAGC | 733 |
| 5509 | CUUUAAGCUCCUUGAGUAA | 307 | 5509 | CUUUAAGCUCCUUGAGUAA | 307 | 5531 | UUACUCAAGGAGCUUAAAG | 734 |
| 5527 | AAAAGGUGGUAUGUAAUUU | 308 | 5527 | AAAAGGUGGUAUGUAAUUU | 308 | 5549 | AAAUUACAUACCACCUUUU | 735 |
| 5545 | UAUGCAAGGUAUUUCUCCA | 309 | 5545 | UAUGCAAGGUAUUUCUCCA | 309 | 5567 | UGGAGAAAUACCUUGCAUA | 736 |
| 5563 | AGUUGGGACUCAGGAUAUU | 310 | 5563 | AGUUGGGACUCAGGAUAUU | 310 | 5585 | AAUAUCCUGAGUCCCAACU | 737 |
| 5581 | UAGUUAAUGAGCCAUCACU | 311 | 5581 | UAGUUAAUGAGCCAUCACU | 311 | 5603 | AGUGAUGGCUCAUUAACUA | 738 |
| 5599 | UAGAAGAAAAGCCCAUUUU | 312 | 5599 | UAGAAGAAAAGCCCAUUUU | 312 | 5621 | AAAAUGGGCUUUUCUUCUA | 739 |
| 5617 | UCAACUGCUUUGAAACUUG | 313 | 5617 | UCAACUGCUUUGAAACUUG | 313 | 5639 | CAAGUUUCAAAGCAGUUGA | 740 |
| 5635 | GCCUGGGGUCUGAGCAUGA | 314 | 5635 | GCCUGGGGUCUGAGCAUGA | 314 | 5657 | UCAUGCUCAGACCCCAGGC | 741 |
| 5653 | AUGGGAAUAGGGAGACAGG | 315 | 5653 | AUGGGAAUAGGGAGACAGG | 315 | 5675 | CCUGUCUCCCUAUUCCCAU | 742 |
| 5671 | GGUAGGAAAGGGCGCCUAC | 316 | 5671 | GGUAGGAAAGGGCGCCUAC | 316 | 5693 | GUAGGCGCCCUUUCCUACC | 743 |
| 5689 | CUCUUCAGGGUCUAAAGAU | 317 | 5689 | CUCUUCAGGGUCUAAAGAU | 317 | 5711 | AUCUUUAGACCCUGAAGAG | 744 |
| 5707 | UCAAGUGGGCCUUGGAUCG | 318 | 5707 | UCAAGUGGGCCUUGGAUCG | 318 | 5729 | CGAUCCAAGGCCCACUUGA | 745 |
| 5725 | GCUAAGCUGGCUCUGUUUG | 319 | 5725 | GCUAAGCUGGCUCUGUUUG | 319 | 5747 | CAAACAGAGCCAGCUUAGC | 746 |
| 5743 | GAUGCUAUUUAUGCAAGUU | 320 | 5743 | GAUGCUAUUUAUGCAAGUU | 320 | 5765 | AACUUGCAUAAAUAGCAUC | 747 |
| 5761 | UAGGGUCUAUGUAUUUAGG | 321 | 5761 | UAGGGUCUAUGUAUUUAGG | 321 | 5783 | CCUAAAUACAUAGACCCUA | 748 |
| 5779 | GAUGCGCCUACUCUUCAGG | 322 | 5779 | GAUGCGCCUACUCUUCAGG | 322 | 5801 | CCUGAAGAGUAGGCGCAUC | 749 |
| 5797 | GGUCUAAAGAUCAAGUGGG | 323 | 5797 | GGUCUAAAGAUCAAGUGGG | 323 | 5819 | CCCACUUGAUCUUUAGACC | 750 |
| 5815 | GCCUUGGAUCGCUAAGCUG | 324 | 5815 | GCCUUGGAUCGCUAAGCUG | 324 | 5837 | CAGCUUAGCGAUCCAAGGC | 751 |
| 5833 | GGCUCUGUUUGAUGCUAUU | 325 | 5833 | GGCUCUGUUUGAUGCUAUU | 325 | 5855 | AAUAGCAUCAAACAGAGCC | 752 |
| 5851 | UUAUGCAAGUUAGGGUCUA | 326 | 5851 | UUAUGCAAGUUAGGGUCUA | 326 | 5873 | UAGACCCUAACUUGCAUAA | 753 |
| 5869 | AUGUAUUUAGGAUGUCUGC | 327 | 5869 | AUGUAUUUAGGAUGUCUGC | 327 | 5891 | GCAGACAUCCUAAAUACAU | 754 |
| 5887 | CACCUUCUGCAGCCAGUCA | 328 | 5887 | CACCUUCUGCAGCCAGUCA | 328 | 5909 | UGACUGGCUGCAGAAGGUG | 755 |
| 5905 | AGAAGCUGGAGAGGCAACA | 329 | 5905 | AGAAGCUGGAGAGGCAACA | 329 | 5927 | UGUUGCCUCUCCAGCUUCU | 756 |
| 5923 | AGUGGAUUGCUGCUUCUUG | 330 | 5923 | AGUGGAUUGCUGCUUCUUG | 330 | 5945 | CAAGAAGCAGCAAUCCACU | 757 |
| 5941 | GGGGAGAAGAGUAUGCUUC | 331 | 5941 | GGGGAGAAGAGUAUGCUUC | 331 | 5963 | GAAGCAUACUCUUCUCCCC | 758 |
| 5959 | CCUUUUAUCCAUGUAAUUU | 332 | 5959 | CCUUUUAUCCAUGUAAUUU | 332 | 5981 | AAAUUACAUGGAUAAAAGG | 759 |
| 5977 | UAACUGUAGAACCUGAGCU | 333 | 5977 | UAACUGUAGAACCUGAGCU | 333 | 5999 | AGCUCAGGUUCUACAGUUA | 760 |
| 5995 | UCUAAGUAACCGAAGAAUG | 334 | 5995 | UCUAAGUAACCGAAGAAUG | 334 | 6017 | CAUUCUUCGGUUACUUAGA | 761 |
| 6013 | GUAUGCCUCUGUUCUUAUG | 335 | 6013 | GUAUGCCUCUGUUCUUAUG | 335 | 6035 | CAUAAGAACAGAGGCAUAC | 762 |
| 6031 | GUGCCACAUCCUUGUUUAA | 336 | 6031 | GUGCCACAUCCUUGUUUAA | 336 | 6053 | UUAAACAAGGAUGUGGCAC | 763 |
| 6049 | AAGGCUCUCUGUAUGAAGA | 337 | 6049 | AAGGCUCUCUGUAUGAAGA | 337 | 6071 | UCUUCAUACAGAGAGCCUU | 764 |
| 6067 | AGAUGGGACCGUCAUCAGC | 338 | 6067 | AGAUGGGACCGUCAUCAGC | 338 | 6089 | GCUGAUGACGGUCCCAUCU | 765 |
| 6085 | CACAUUCCCUAGUGAGCCU | 339 | 6085 | CACAUUCCCUAGUGAGCCU | 339 | 6107 | AGGCUCACUAGGGAAUGUG | 766 |
| 6103 | UACUGGCUCCUGGCAGCGG | 340 | 6103 | UACUGGCUCCUGGCAGCGG | 340 | 6125 | CCGCUGCCAGGAGCCAGUA | 767 |
| 6121 | GCUUUUGUGGAAGACUCAC | 341 | 6121 | GCUUUUGUGGAAGACUCAC | 341 | 6143 | GUGAGUCUUCCACAAAAGC | 768 |
| 6139 | CUAGCCAGAAGAGAGGAGU | 342 | 6139 | CUAGCCAGAAGAGAGGAGU | 342 | 6161 | ACUCCUCUCUUCUGGCUAG | 769 |
| 6157 | UGGGACAGUCCUCUCCACC | 343 | 6157 | UGGGACAGUCCUCUCCACC | 343 | 6179 | GGUGGAGAGGACUGUCCCA | 770 |
| 6175 | CAAGAUCUAAAUCCAAACA | 344 | 6175 | CAAGAUCUAAAUCCAAACA | 344 | 6197 | UGUUUGGAUUUAGAUCUUG | 771 |
| 6193 | AAAAGCAGGCUAGAGCCAG | 345 | 6193 | AAAAGCAGGCUAGAGCCAG | 345 | 6215 | CUGGCUCUAGCCUGCUUUU | 772 |
| 6211 | GAAGAGAGGACAAAUCUUU | 346 | 6211 | GAAGAGAGGACAAAUCUUU | 346 | 6233 | AAAGAUUUGUCCUCUCUUC | 773 |
| 6229 | UGUUGUUCCUCUUCUUUAC | 347 | 6229 | UGUUGUUCCUCUUCUUUAC | 347 | 6251 | GUAAAGAAGAGGAACAACA | 774 |
| 6247 | CACAUACGCAAACCACCUG | 348 | 6247 | CACAUACGCAAACCACCUG | 348 | 6269 | CAGGUGGUUUGCGUAUGUG | 775 |
| 6265 | GUGACAGCUGGCAAUUUUA | 349 | 6265 | GUGACAGCUGGCAAUUUUA | 349 | 6287 | UAAAAUUGCCAGCUGUCAC | 776 |
| 6283 | AUAAAUCAGGUAACUGGAA | 350 | 6283 | AUAAAUCAGGUAACUGGAA | 350 | 6305 | UUCCAGUUACCUGAUUUAU | 777 |
| 6301 | AGGAGGUUAAACUCAGAAA | 351 | 6301 | AGGAGGUUAAACUCAGAAA | 351 | 6323 | UUUCUGAGUUUAACCUCCU | 778 |
| 6319 | AAAAGAAGACCUCAGUCAA | 352 | 6319 | AAAAGAAGACCUCAGUCAA | 352 | 6341 | UUGACUGAGGUCUUCUUUU | 779 |
| 6337 | AUUCUCUACUUUUUUUUUU | 353 | 6337 | AUUCUCUACUUUUUUUUUU | 353 | 6359 | AAAAAAAAAAGUAGAGAAU | 780 |
| 6355 | UUUUUUUCCAAAUCAGAUA | 354 | 6355 | UUUUUUUCCAAAUCAGAUA | 354 | 6377 | UAUCUGAUUUGGAAAAAAA | 781 |
| 6373 | AAUAGCCCAGCAAAUAGUG | 355 | 6373 | AAUAGCCCAGCAAAUAGUG | 355 | 6395 | CACUAUUUGCUGGGCUAUU | 782 |
| 6391 | GAUAACAAAUAAAACCUUA | 356 | 6391 | GAUAACAAAUAAAACCUUA | 356 | 6413 | UAAGGUUUUAUUUGUUAUC | 783 |
| 6409 | AGCUGUUCAUGUCUUGAUU | 357 | 6409 | AGCUGUUCAUGUCUUGAUU | 357 | 6431 | AAUCAAGACAUGAACAGCU | 784 |
| 6427 | UUCAAUAAUUAAUUCUUAA | 358 | 6427 | UUCAAUAAUUAAUUCUUAA | 358 | 6449 | UUAAGAAUUAAUUAUUGAA | 785 |
| 6445 | AUCAUUAAGAGACCAUAAU | 359 | 6445 | AUCAUUAAGAGACCAUAAU | 359 | 6467 | AUUAUGGUCUCUUAAUGAU | 786 |
| 6463 | UAAAUACUCCUUUUCAAGA | 360 | 6463 | UAAAUACUCCUUUUCAAGA | 360 | 6485 | UCUUGAAAAGGAGUAUUUA | 787 |
| 6481 | AGAAAAGCAAAACCAUUAG | 361 | 6481 | AGAAAAGCAAAACCAUUAG | 361 | 6503 | CUAAUGGUUUUGCUUUUCU | 788 |
| 6499 | GAAUUGUUACUCAGCUCCU | 362 | 6499 | GAAUUGUUACUCAGCUCCU | 362 | 6521 | AGGAGCUGAGUAACAAUUC | 789 |
| 6517 | UUCAAACUCAGGUUUGUAG | 363 | 6517 | UUCAAACUCAGGUUUGUAG | 363 | 6539 | CUACAAACCUGAGUUUGAA | 790 |
| 6535 | GCAUACAUGAGUCCAUCCA | 364 | 6535 | GCAUACAUGAGUCCAUCCA | 364 | 6557 | UGGAUGGACUCAUGUAUGC | 791 |
| 6553 | AUCAGUCAAAGAAUGGUUC | 365 | 6553 | AUCAGUCAAAGAAUGGUUC | 365 | 6575 | GAACCAUUCUUUGACUGAU | 792 |
| 6571 | CCAUCUGGAGUCUUAAUGU | 366 | 6571 | CCAUCUGGAGUCUUAAUGU | 366 | 6593 | ACAUUAAGACUCCAGAUGG | 793 |
| 6589 | UAGAAAGAAAAAUGGAGAC | 367 | 6589 | UAGAAAGAAAAAUGGAGAC | 367 | 6611 | GUCUCCAUUUUUCUUUCUA | 794 |
| 6607 | CUUGUAAUAAUGAGCUAGU | 368 | 6607 | CUUGUAAUAAUGAGCUAGU | 368 | 6629 | ACUAGCUCAUUAUUACAAG | 795 |
| 6625 | UUACAAAGUGCUUGUUCAU | 369 | 6625 | UUACAAAGUGCUUGUUCAU | 369 | 6647 | AUGAACAAGCACUUUGUAA | 796 |
| 6643 | UUAAAAUAGCACUGAAAAU | 370 | 6643 | UUAAAAUAGCACUGAAAAU | 370 | 6665 | AUUUUCAGUGCUAUUUUAA | 797 |
| 6661 | UUGAAACAUGAAUUAACUG | 371 | 6661 | UUGAAACAUGAAUUAACUG | 371 | 6683 | CAGUUAAUUCAUGUUUCAA | 798 |
| 6679 | GAUAAUAUUCCAAUCAUUU | 372 | 6679 | GAUAAUAUUCCAAUCAUUU | 372 | 6701 | AAAUGAUUGGAAUAUUAUC | 799 |
| 6697 | UGCCAUUUAUGACAAAAAU | 373 | 6697 | UGCCAUUUAUGACAAAAAU | 373 | 6719 | AUUUUUGUCAUAAAUGGCA | 800 |
| 6715 | UGGUUGGCACUAACAAAGA | 374 | 6715 | UGGUUGGCACUAACAAAGA | 374 | 6737 | UCUUUGUUAGUGCCAACCA | 801 |
| 6733 | AACGAGCACUUCCUUUCAG | 375 | 6733 | AACGAGCACUUCCUUUCAG | 375 | 6755 | CUGAAAGGAAGUGCUCGUU | 802 |
| 6751 | GAGUUUCUGAGAUAAUGUA | 376 | 6751 | GAGUUUCUGAGAUAAUGUA | 376 | 6773 | UACAUUAUCUCAGAAACUC | 803 |
| 6769 | ACGUGGAACAGUCUGGGUG | 377 | 6769 | ACGUGGAACAGUCUGGGUG | 377 | 6791 | CACCCAGACUGUUCCACGU | 804 |
| 6787 | GGAAUGGGGCUGAAACCAU | 378 | 6787 | GGAAUGGGGCUGAAACCAU | 378 | 6809 | AUGGUUUCAGCCCCAUUCC | 805 |
| 6805 | UGUGCAAGUCUGUGUCUUG | 379 | 6805 | UGUGCAAGUCUGUGUCUUG | 379 | 6827 | CAAGACACAGACUUGCACA | 806 |
| 6823 | GUCAGUCCAAGAAGUGACA | 380 | 6823 | GUCAGUCCAAGAAGUGACA | 380 | 6845 | UGUCACUUCUUGGACUGAC | 807 |
| 6841 | ACCGAGAUGUUAAUUUUAG | 381 | 6841 | ACCGAGAUGUUAAUUUUAG | 381 | 6863 | CUAAAAUUAACAUCUCGGU | 808 |
| 6859 | GGGACCCGUGCCUUGUUUC | 382 | 6859 | GGGACCCGUGCCUUGUUUC | 382 | 6881 | GAAACAAGGCACGGGUCCC | 809 |
| 6877 | CCUAGCCCACAAGAAUGCA | 383 | 6877 | CCUAGCCCACAAGAAUGCA | 383 | 6899 | UGCAUUCUUGUGGGCUAGG | 810 |
| 6895 | AAACAUCAAACAGAUACUC | 384 | 6895 | AAACAUCAAACAGAUACUC | 384 | 6917 | GAGUAUCUGUUUGAUGUUU | 811 |
| 6913 | CGCUAGCCUCAUUUAAAUU | 385 | 6913 | CGCUAGCCUCAUUUAAAUU | 385 | 6935 | AAUUUAAAUGAGGCUAGCG | 812 |
| 6931 | UGAUUAAAGGAGGAGUGCA | 386 | 6931 | UGAUUAAAGGAGGAGUGCA | 386 | 6953 | UGCACUCCUCCUUUAAUCA | 813 |
| 6949 | AUCUUUGGCCGACAGUGGU | 387 | 6949 | AUCUUUGGCCGACAGUGGU | 387 | 6971 | ACCACUGUCGGCCAAAGAU | 814 |
| 6967 | UGUAACUGUGUGUGUGUGU | 388 | 6967 | UGUAACUGUGUGUGUGUGU | 388 | 6989 | ACACACACACACAGUUACA | 815 |
| 6985 | UGUGUGUGUGUGUGUGUGU | 389 | 6985 | UGUGUGUGUGUGUGUGUGU | 389 | 7007 | ACACACACACACACACACA | 816 |
| 7003 | UGUGUGUGUGUGGGUGUGG | 390 | 7003 | UGUGUGUGUGUGGGUGUGG | 390 | 7025 | CCACACCCACACACACACA | 817 |
| 7021 | GGUGUAUGUGUGUUUUGUG | 391 | 7021 | GGUGUAUGUGUGUUUUGUG | 391 | 7043 | CACAAAACACACAUACACC | 818 |
| 7039 | GCAUAACUAUUUAAGGAAA | 392 | 7039 | GCAUAACUAUUUAAGGAAA | 392 | 7061 | UUUCCUUAAAUAGUUAUGC | 819 |
| 7057 | ACUGGAAUUUUAAAGUUAC | 393 | 7057 | ACUGGAAUUUUAAAGUUAC | 393 | 7079 | GUAACUUUAAAAUUCCAGU | 820 |
| 7075 | CUUUUAUACAAACCAAGAA | 394 | 7075 | CUUUUAUACAAACCAAGAA | 394 | 7097 | UUCUUGGUUUGUAUAAAAG | 821 |
| 7093 | AUAUAUGCUACAGAUAUAA | 395 | 7093 | AUAUAUGCUACAGAUAUAA | 395 | 7115 | UUAUAUCUGUAGCAUAUAU | 822 |
| 7111 | AGACAGACAUGGUUUGGUC | 396 | 7111 | AGACAGACAUGGUUUGGUC | 396 | 7133 | GACCAAACCAUGUCUGUCU | 823 |
| 7129 | CCUAUAUUUCUAGUCAUGA | 397 | 7129 | CCUAUAUUUCUAGUCAUGA | 397 | 7151 | UCAUGACUAGAAAUAUAGG | 824 |
| 7147 | AUGAAUGUAUUUUGUAUAC | 398 | 7147 | AUGAAUGUAUUUUGUAUAC | 398 | 7169 | GUAUACAAAAUACAUUCAU | 825 |
| 7165 | CCAUCUUCAUAUAAUAUAC | 399 | 7165 | CCAUCUUCAUAUAAUAUAC | 399 | 7187 | GUAUAUUAUAUGAAGAUGG | 826 |
| 7183 | CUUAAAAAUAUUUCUUAAU | 400 | 7183 | CUUAAAAAUAUUUCUUAAU | 400 | 7205 | AUUAAGAAAUAUUUUUAAG | 827 |
| 7201 | UUGGGAUUUGUAAUCGUAC | 401 | 7201 | UUGGGAUUUGUAAUCGUAC | 401 | 7223 | GUACGAUUACAAAUCCCAA | 828 |
| 7219 | CCAACUUAAUUGAUAAACU | 402 | 7219 | CCAACUUAAUUGAUAAACU | 402 | 7241 | AGUUUAUCAAUUAAGUUGG | 829 |
| 7237 | UUGGCAACUGCUUUUAUGU | 403 | 7237 | UUGGCAACUGCUUUUAUGU | 403 | 7259 | ACAUAAAAGCAGUUGCCAA | 830 |
| 7255 | UUCUGUCUCCUUCCAUAAA | 404 | 7255 | UUCUGUCUCCUUCCAUAAA | 404 | 7277 | UUUAUGGAAGGAGACAGAA | 831 |
| 7273 | AUUUUUCAAAAUACUAAUU | 405 | 7273 | AUUUUUCAAAAUACUAAUU | 405 | 7295 | AAUUAGUAUUUUGAAAAAU | 832 |
| 7291 | UCAACAAAGAAAAAGCUCU | 406 | 7291 | UCAACAAAGAAAAAGCUCU | 406 | 7313 | AGAGCUUUUUCUUUGUUGA | 833 |
| 7309 | UUUUUUUUCCUAAAAUAAA | 407 | 7309 | UUUUUUUUCCUAAAAUAAA | 407 | 7331 | UUUAUUUUAGGAAAAAAAA | 834 |
| 7327 | ACUCAAAUUUAUCCUUGUU | 408 | 7327 | ACUCAAAUUUAUCCUUGUU | 408 | 7349 | AACAAGGAUAAAUUUGAGU | 835 |
| 7345 | UUAGAGCAGAGAAAAAUUA | 409 | 7345 | UUAGAGCAGAGAAAAAUUA | 409 | 7367 | UAAUUUUUCUCUGCUCUAA | 836 |
| 7363 | AAGAAAAACUUUGAAAUGG | 410 | 7363 | AAGAAAAACUUUGAAAUGG | 410 | 7385 | CCAUUUCAAAGUUUUUCUU | 837 |
| 7381 | GUCUCAAAAAAUUGCUAAA | 411 | 7381 | GUCUCAAAAAAUUGCUAAA | 411 | 7403 | UUUAGCAAUUUUUUGAGAC | 838 |
| 7399 | AUAUUUUCAAUGGAAAACU | 412 | 7399 | AUAUUUUCAAUGGAAAACU | 412 | 7421 | AGUUUUCCAUUGAAAAUAU | 839 |
| 7417 | UAAAUGUUAGUUUAGCUGA | 413 | 7417 | UAAAUGUUAGUUUAGCUGA | 413 | 7439 | UCAGCUAAACUAACAUUUA | 840 |
| 7435 | AUUGUAUGGGGUUUUCGAA | 414 | 7435 | AUUGUAUGGGGUUUUCGAA | 414 | 7457 | UUCGAAAACCCCAUACAAU | 841 |
| 7453 | ACCUUUCACUUUUUGUUUG | 415 | 7453 | ACCUUUCACUUUUUGUUUG | 415 | 7475 | CAAACAAAAAGUGAAAGGU | 842 |
| 7471 | GUUUUACCUAUUUCACAAC | 416 | 7471 | GUUUUACCUAUUUCACAAC | 416 | 7493 | GUUGUGAAAUAGGUAAAAC | 843 |
| 7489 | CUGUGUAAAUUGCCAAUAA | 417 | 7489 | CUGUGUAAAUUGCCAAUAA | 417 | 7511 | UUAUUGGCAAUUUACACAG | 844 |
| 7507 | AUUCCUGUCCAUGAAAAUG | 418 | 7507 | AUUCCUGUCCAUGAAAAUG | 418 | 7529 | CAUUUUCAUGGACAGGAAU | 845 |
| 7525 | GCAAAUUAUCCAGUGUAGA | 419 | 7525 | GCAAAUUAUCCAGUGUAGA | 419 | 7547 | UCUACACUGGAUAAUUUGC | 846 |
| 7543 | AUAUAUUUGACCAUCACCC | 420 | 7543 | AUAUAUUUGACCAUCACCC | 420 | 7565 | GGGUGAUGGUCAAAUAUAU | 847 |
| 7561 | CUAUGGAUAUUGGCUAGUU | 421 | 7561 | CUAUGGAUAUUGGCUAGUU | 421 | 7583 | AACUAGCCAAUAUCCAUAG | 848 |
| 7579 | UUUGCCUUUAUUAAGCAAA | 422 | 7579 | UUUGCCUUUAUUAAGCAAA | 422 | 7601 | UUUGCUUAAUAAAGGCAAA | 849 |
| 7597 | AUUCAUUUCAGCCUGAAUG | 423 | 7597 | AUUCAUUUCAGCCUGAAUG | 423 | 7619 | CAUUCAGGCUGAAAUGAAU | 850 |
| 7615 | GUCUGCCUAUAUAUUCUCU | 424 | 7615 | GUCUGCCUAUAUAUUCUCU | 424 | 7637 | AGAGAAUAUAUAGGCAGAC | 851 |
| 7633 | UGCUCUUUGUAUUCUCCUU | 425 | 7633 | UGCUCUUUGUAUUCUCCUU | 425 | 7655 | AAGGAGAAUACAAAGAGCA | 852 |
| 7651 | UUGAACCCGUUAAAACAUC | 426 | 7651 | UUGAACCCGUUAAAACAUC | 426 | 7673 | GAUGUUUUAACGGGUUCAA | 853 |
| 7662 | AAAACAUCCUGUGGCACUC | 427 | 7662 | AAAACAUCCUGUGGCACUC | 427 | 7684 | GAGUGCCACAGGAUGUUUU | 854 |
| VEGFR2 gi\|11321596\|ref\|NM_002252.1 | | | | | | | | |
| 1 | ACUGAGUCCCGGGACCCCG | 855 | 1 | ACUGAGUCCCGGGACCCCG | 855 | 23 | CGGGGUCCCGGGACUCAGU | 1179 |
| 19 | GGGAGAGCGGUCAGUGUGU | 856 | 19 | GGGAGAGCGGUCAGUGUGU | 856 | 41 | ACACACUGACCGCUCUCCC | 1180 |
| 37 | UGGUCGCUGCGUUUCCUCU | 857 | 37 | UGGUCGCUGCGUUUCCUCU | 857 | 59 | AGAGGAAACGCAGCGACCA | 1181 |
| 55 | UGCCUGCGCCGGGCAUCAC | 858 | 55 | UGCCUGCGCCGGGCAUCAC | 858 | 77 | GUGAUGCCCGGCGCAGGCA | 1182 |
| 73 | CUUGCGCGCCGCAGAAAGU | 859 | 73 | CUUGCGCGCCGCAGAAAGU | 859 | 95 | ACUUUCUGCGGCGCGCAAG | 1183 |
| 91 | UCCGUCUGGCAGCCUGGAU | 860 | 91 | UCCGUCUGGCAGCCUGGAU | 860 | 113 | AUCCAGGCUGCCAGACGGA | 1184 |
| 109 | UAUCCUCUCCUACCGGCAC | 861 | 109 | UAUCCUCUCCUACCGGCAC | 861 | 131 | GUGCCGGUAGGAGAGGAUA | 1185 |
| 127 | CCCGCAGACGCCCCUGCAG | 862 | 127 | CCCGCAGACGCCCCUGCAG | 862 | 149 | CUGCAGGGGCGUCUGCGGG | 1186 |
| 145 | GCCGCCGGUCGGCGCCCGG | 863 | 145 | GCCGCCGGUCGGCGCCCGG | 863 | 167 | CCGGGCGCCGACCGGCGGC | 1187 |
| 163 | GGCUCCCUAGCCCUGUGCG | 864 | 163 | GGCUCCCUAGCCCUGUGCG | 864 | 185 | CGCACAGGGCUAGGGAGCC | 1188 |
| 181 | GCUCAACUGUCCUGCGCUG | 865 | 181 | GCUCAACUGUCCUGCGCUG | 865 | 203 | CAGCGCAGGACAGUUGAGC | 1189 |
| 199 | GCGGGGUGCCGCGAGUUCC | 866 | 199 | GCGGGGUGCCGCGAGUUCC | 866 | 221 | GGAACUCGCGGCACCCCGC | 1190 |
| 217 | CACCUCCGCGCCUCCUUCU | 867 | 217 | CACCUCCGCGCCUCCUUCU | 867 | 239 | AGAAGGAGGCGCGGAGGUG | 1191 |
| 235 | UCUAGACAGGCGCUGGGAG | 868 | 235 | UCUAGACAGGCGCUGGGAG | 868 | 257 | CUCCCAGCGCCUGUCUAGA | 1192 |
| 253 | GAAAGAACCGGCUCCCGAG | 869 | 253 | GAAAGAACCGGCUCCCGAG | 869 | 275 | CUCGGGAGCCGGUUCUUUC | 1193 |
| 271 | GUUCUGGGCAUUUCGCCCG | 870 | 271 | GUUCUGGGCAUUUCGCCCG | 870 | 293 | CGGGCGAAAUGCCCAGAAC | 1194 |
| 289 | GGCUCGAGGUGCAGGAUGC | 871 | 289 | GGCUCGAGGUGCAGGAUGC | 871 | 311 | GCAUCCUGCACCUCGAGCC | 1195 |
| 307 | CAGAGCAAGGUGCUGCUGG | 872 | 307 | CAGAGCAAGGUGCUGCUGG | 872 | 329 | CCAGCAGCACCUUGCUCUG | 1196 |
| 325 | GCCGUCGCCCUGUGGCUCU | 873 | 325 | GCCGUCGCCCUGUGGCUCU | 873 | 347 | AGAGCCACAGGGCGACGGC | 1197 |
| 343 | UGCGUGGAGACCCGGGCCG | 874 | 343 | UGCGUGGAGACCCGGGCCG | 874 | 365 | CGGCCCGGGUCUCCACGCA | 1198 |
| 361 | GCCUCUGUGGGUUUGCCUA | 875 | 361 | GCCUCUGUGGGUUUGCCUA | 875 | 383 | UAGGCAAACCCACAGAGGC | 1199 |
| 379 | AGUGUUUCUCUUGAUCUGC | 876 | 379 | AGUGUUUCUCUUGAUCUGC | 876 | 401 | GCAGAUCAAGAGAAACACU | 1200 |
| 397 | CCCAGGCUCAGCAUACAAA | 877 | 397 | CCCAGGCUCAGCAUACAAA | 877 | 419 | UUUGUAUGCUGAGCCUGGG | 1201 |
| 415 | AAAGACAUACUUACAAUUA | 878 | 415 | AAAGACAUACUUACAAUUA | 878 | 437 | UAAUUGUAAGUAUGUCUUU | 1202 |
| 433 | AAGGCUAAUACAACUCUUC | 879 | 433 | AAGGCUAAUACAACUCUUC | 879 | 455 | GAAGAGUUGUAUUAGCCUU | 1203 |
| 451 | CAAAUUACUUGCAGGGGAC | 880 | 451 | CAAAUUACUUGCAGGGGAC | 880 | 473 | GUCCCCUGCAAGUAAUUUG | 1204 |
| 469 | CAGAGGGACUUGGACUGGC | 881 | 469 | CAGAGGGACUUGGACUGGC | 881 | 491 | GCCAGUCCAAGUCCCUCUG | 1205 |
| 487 | CUUUGGCCCAAUAAUCAGA | 882 | 487 | CUUUGGCCCAAUAAUCAGA | 882 | 509 | UCUGAUUAUUGGGCCAAAG | 1206 |
| 505 | AGUGGCAGUGAGCAAAGGG | 883 | 505 | AGUGGCAGUGAGCAAAGGG | 883 | 527 | CCCUUUGCUCACUGCCACU | 1207 |
| 523 | GUGGAGGUGACUGAGUGCA | 884 | 523 | GUGGAGGUGACUGAGUGCA | 884 | 545 | UGCACUCAGUCACCUCCAC | 1208 |
| 541 | AGCGAUGGCCUCUUCUGUA | 885 | 541 | AGCGAUGGCCUCUUCUGUA | 885 | 563 | UACAGAAGAGGCCAUCGCU | 1209 |
| 559 | AAGACACUCACAAUUCCAA | 886 | 559 | AAGACACUCACAAUUCCAA | 886 | 581 | UUGGAAUUGUGAGUGUCUU | 1210 |
| 577 | AAAGUGAUCGGAAAUGACA | 887 | 577 | AAAGUGAUCGGAAAUGACA | 887 | 599 | UGUCAUUUCCGAUCACUUU | 1211 |
| 595 | ACUGGAGCCUACAAGUGCU | 888 | 595 | ACUGGAGCCUACAAGUGCU | 888 | 617 | AGCACUUGUAGGCUCCAGU | 1212 |
| 613 | UUCUACCGGGAAACUGACU | 889 | 613 | UUCUACCGGGAAACUGACU | 889 | 635 | AGUCAGUUUCCCGGUAGAA | 1213 |
| 631 | UUGGCCUCGGUCAUUUAUG | 890 | 631 | UUGGCCUCGGUCAUUUAUG | 890 | 653 | CAUAAAUGACCGAGGCCAA | 1214 |
| 649 | GUCUAUGUUCAAGAUUACA | 891 | 649 | GUCUAUGUUCAAGAUUACA | 891 | 671 | UGUAAUCUUGAACAUAGAC | 1215 |
| 667 | AGAUCUCCAUUUAUUGCUU | 892 | 667 | AGAUCUCCAUUUAUUGCUU | 892 | 689 | AAGCAAUAAAUGGAGAUCU | 1216 |
| 685 | UCUGUUAGUGACCAACAUG | 893 | 685 | UCUGUUAGUGACCAACAUG | 893 | 707 | CAUGUUGGUCACUAACAGA | 1217 |
| 703 | GGAGUCGUGUACAUUACUG | 894 | 703 | GGAGUCGUGUACAUUACUG | 894 | 725 | CAGUAAUGUACACGACUCC | 1218 |
| 721 | GAGAACAAAAACAAAACUG | 895 | 721 | GAGAACAAAAACAAAACUG | 895 | 743 | CAGUUUUGUUUUUGUUCUC | 1219 |
| 739 | GUGGUGAUUCCAUGUCUCG | 896 | 739 | GUGGUGAUUCCAUGUCUCG | 896 | 761 | CGAGACAUGGAAUCACCAC | 1220 |
| 757 | GGGUCCAUUUCAAAUCUCA | 897 | 757 | GGGUCCAUUUCAAAUCUCA | 897 | 779 | UGAGAUUUGAAAUGGACCC | 1221 |
| 775 | AACGUGUCACUUUGUGCAA | 898 | 775 | AACGUGUCACUUUGUGCAA | 898 | 797 | UUGCACAAAGUGACACGUU | 1222 |
| 793 | AGAUACCCAGAAAAGAGAU | 899 | 793 | AGAUACCCAGAAAAGAGAU | 899 | 815 | AUCUCUUUUCUGGGUAUCU | 1223 |
| 811 | UUUGUUCCUGAUGGUAACA | 900 | 811 | UUUGUUCCUGAUGGUAACA | 900 | 833 | UGUUACCAUCAGGAACAAA | 1224 |
| 829 | AGAAUUUCCUGGGACAGCA | 901 | 829 | AGAAUUUCCUGGGACAGCA | 901 | 851 | UGCUGUCCCAGGAAAUUCU | 1225 |
| 847 | AAGAAGGGCUUUACUAUUC | 902 | 847 | AAGAAGGGCUUUACUAUUC | 902 | 869 | GAAUAGUAAAGCCCUUCUU | 1226 |
| 865 | CCCAGCUACAUGAUCAGCU | 903 | 865 | CCCAGCUACAUGAUCAGCU | 903 | 887 | AGCUGAUCAUGUAGCUGGG | 1227 |
| 883 | UAUGCUGGCAUGGUCUUCU | 904 | 883 | UAUGCUGGCAUGGUCUUCU | 904 | 905 | AGAAGACCAUGCCAGCAUA | 1228 |
| 901 | UGUGAAGCAAAAAUUAAUG | 905 | 901 | UGUGAAGCAAAAAUUAAUG | 905 | 923 | CAUUAAUUUUUGCUUCACA | 1229 |
| 919 | GAUGAAAGUUACCAGUCUA | 906 | 919 | GAUGAAAGUUACCAGUCUA | 906 | 941 | UAGACUGGUAACUUUCAUC | 1230 |
| 937 | AUUAUGUACAUAGUUGUCG | 907 | 937 | AUUAUGUACAUAGUUGUCG | 907 | 959 | CGACAACUAUGUACAUAAU | 1231 |
| 955 | GUUGUAGGGUAUAGGAUUU | 908 | 955 | GUUGUAGGGUAUAGGAUUU | 908 | 977 | AAAUCCUAUACCCUACAAC | 1232 |
| 973 | UAUGAUGUGGUUCUGAGUC | 909 | 973 | UAUGAUGUGGUUCUGAGUC | 909 | 995 | GACUCAGAACCACAUCAUA | 1233 |
| 991 | CCGUCUCAUGGAAUUGAAC | 910 | 991 | CCGUCUCAUGGAAUUGAAC | 910 | 1013 | GUUCAAUUCCAUGAGACGG | 1234 |
| 1009 | CUAUCUGUUGGAGAAAAGC | 911 | 1009 | CUAUCUGUUGGAGAAAAGC | 911 | 1031 | GCUUUUCUCCAACAGAUAG | 1235 |
| 1027 | CUUGUCUUAAAUUGUACAG | 912 | 1027 | CUUGUCUUAAAUUGUACAG | 912 | 1049 | CUGUACAAUUUAAGACAAG | 1236 |
| 1045 | GCAAGAACUGAACUAAAUG | 913 | 1045 | GCAAGAACUGAACUAAAUG | 913 | 1067 | CAUUUAGUUCAGUUCUUGC | 1237 |
| 1063 | GUGGGGAUUGACUUCAACU | 914 | 1063 | GUGGGGAUUGACUUCAACU | 914 | 1085 | AGUUGAAGUCAAUCCCCAC | 1238 |
| 1081 | UGGGAAUACCCUUCUUCGA | 915 | 1081 | UGGGAAUACCCUUCUUCGA | 915 | 1103 | UCGAAGAAGGGUAUUCCCA | 1239 |
| 1099 | AAGCAUCAGCAUAAGAAAC | 916 | 1099 | AAGCAUCAGCAUAAGAAAC | 916 | 1121 | GUUUCUUAUGCUGAUGCUU | 1240 |
| 1117 | CUUGUAAACCGAGACCUAA | 917 | 1117 | CUUGUAAACCGAGACCUAA | 917 | 1139 | UUAGGUCUCGGUUUACAAG | 1241 |
| 1135 | AAAACCCAGUCUGGGAGUG | 918 | 1135 | AAAACCCAGUCUGGGAGUG | 918 | 1157 | CACUCCCAGACUGGGUUUU | 1242 |
| 1153 | GAGAUGAAGAAAUUUUUGA | 919 | 1153 | GAGAUGAAGAAAUUUUUGA | 919 | 1175 | UCAAAAAUUUCUUCAUCUC | 1243 |
| 1171 | AGCACCUUAACUAUAGAUG | 920 | 1171 | AGCACCUUAACUAUAGAUG | 920 | 1193 | CAUCUAUAGUUAAGGUGCU | 1244 |
| 1189 | GGUGUAACCCGGAGUGACC | 921 | 1189 | GGUGUAACCCGGAGUGACC | 921 | 1211 | GGUCACUCCGGGUUACACC | 1245 |
| 1207 | CAAGGAUUGUACACCUGUG | 922 | 1207 | CAAGGAUUGUACACCUGUG | 922 | 1229 | CACAGGUGUACAAUCCUUG | 1246 |
| 1225 | GCAGCAUCCAGUGGGCUGA | 923 | 1225 | GCAGCAUCCAGUGGGCUGA | 923 | 1247 | UCAGCCCACUGGAUGCUGC | 1247 |
| 1243 | AUGACCAAGAAGAACAGCA | 924 | 1243 | AUGACCAAGAAGAACAGCA | 924 | 1265 | UGCUGUUCUUCUUGGUCAU | 1248 |
| 1261 | ACAUUUGUCAGGGUCCAUG | 925 | 1261 | ACAUUUGUCAGGGUCCAUG | 925 | 1283 | CAUGGACCCUGACAAAUGU | 1249 |
| 1279 | GAAAAACCUUUUGUUGCUU | 926 | 1279 | GAAAAACCUUUUGUUGCUU | 926 | 1301 | AAGCAACAAAAGGUUUUUC | 1250 |
| 1297 | UUUGGAAGUGGCAUGGAAU | 927 | 1297 | UUUGGAAGUGGCAUGGAAU | 927 | 1319 | AUUCCAUGCCACUUCCAAA | 1251 |
| 1315 | UCUCUGGUGGAAGCCACGG | 928 | 1315 | UCUCUGGUGGAAGCCACGG | 928 | 1337 | CCGUGGCUUCCACCAGAGA | 1252 |
| 1333 | GUGGGGGAGCGUGUCAGAA | 929 | 1333 | GUGGGGGAGCGUGUCAGAA | 929 | 1355 | UUCUGACACGCUCCCCCAC | 1253 |
| 1351 | AUCCCUGCGAAGUACCUUG | 930 | 1351 | AUCCCUGCGAAGUACCUUG | 930 | 1373 | CAAGGUACUUCGCAGGGAU | 1254 |
| 1369 | GGUUACCCACCCCCAGAAA | 931 | 1369 | GGUUACCCACCCCCAGAAA | 931 | 1391 | UUUCUGGGGGUGGGUAACC | 1255 |
| 1387 | AUAAAAUGGUAUAAAAAUG | 932 | 1387 | AUAAAAUGGUAUAAAAAUG | 932 | 1409 | CAUUUUUAUACCAUUUUAU | 1256 |
| 1405 | GGAAUACCCCUUGAGUCCA | 933 | 1405 | GGAAUACCCCUUGAGUCCA | 933 | 1427 | UGGACUCAAGGGGUAUUCC | 1257 |
| 1423 | AAUCACACAAUUAAAGCGG | 934 | 1423 | AAUCACACAAUUAAAGCGG | 934 | 1445 | CCGCUUUAAUUGUGUGAUU | 1258 |
| 1441 | GGGCAUGUACUGACGAUUA | 935 | 1441 | GGGCAUGUACUGACGAUUA | 935 | 1463 | UAAUCGUCAGUACAUGCCC | 1259 |
| 1459 | AUGGAAGUGAGUGAAAGAG | 936 | 1459 | AUGGAAGUGAGUGAAAGAG | 936 | 1481 | CUCUUUCACUCACUUCCAU | 1260 |
| 1477 | GACACAGGAAAUUACACUG | 937 | 1477 | GACACAGGAAAUUACACUG | 937 | 1499 | CAGUGUAAUUUCCUGUGUC | 1261 |
| 1495 | GUCAUCCUUACCAAUCCCA | 938 | 1495 | GUCAUCCUUACCAAUCCCA | 938 | 1517 | UGGGAUUGGUAAGGAUGAC | 1262 |
| 1513 | AUUUCAAAGGAGAAGCAGA | 939 | 1513 | AUUUCAAAGGAGAAGCAGA | 939 | 1535 | UCUGCUUCUCCUUUGAAAU | 1263 |
| 1531 | AGCCAUGUGGUCUCUCUGG | 940 | 1531 | AGCCAUGUGGUCUCUCUGG | 940 | 1553 | CCAGAGAGACCACAUGGCU | 1264 |
| 1549 | GUUGUGUAUGUCCCACCCC | 941 | 1549 | GUUGUGUAUGUCCCACCCC | 941 | 1571 | GGGGUGGGACAUACACAAC | 1265 |
| 1567 | CAGAUUGGUGAGAAAUCUC | 942 | 1567 | CAGAUUGGUGAGAAAUCUC | 942 | 1589 | GAGAUUUCUCACCAAUCUG | 1266 |
| 1585 | CUAAUCUCUCCUGUGGAUU | 943 | 1585 | CUAAUCUCUCCUGUGGAUU | 943 | 1607 | AAUCCACAGGAGAGAUUAG | 1267 |
| 1603 | UCCUACCAGUACGGCACCA | 944 | 1603 | UCCUACCAGUACGGCACCA | 944 | 1625 | UGGUGCCGUACUGGUAGGA | 1268 |
| 1621 | ACUCAAACGCUGACAUGUA | 945 | 1621 | ACUCAAACGCUGACAUGUA | 945 | 1643 | UACAUGUCAGCGUUUGAGU | 1269 |
| 1639 | ACGGUCUAUGCCAUUCCUC | 946 | 1639 | ACGGUCUAUGCCAUUCCUC | 946 | 1661 | GAGGAAUGGCAUAGACCGU | 1270 |
| 1657 | CCCCCGCAUCACAUCCACU | 947 | 1657 | CCCCCGCAUCACAUCCACU | 947 | 1679 | AGUGGAUGUGAUGCGGGGG | 1271 |
| 1675 | UGGUAUUGGCAGUUGGAGG | 948 | 1675 | UGGUAUUGGCAGUUGGAGG | 948 | 1697 | CCUCCAACUGCCAAUACCA | 1272 |
| 1693 | GAAGAGUGCGCCAACGAGC | 949 | 1693 | GAAGAGUGCGCCAACGAGC | 949 | 1715 | GCUCGUUGGCGCACUCUUC | 1273 |
| 1711 | CCCAGCCAAGCUGUCUCAG | 950 | 1711 | CCCAGCCAAGCUGUCUCAG | 950 | 1733 | CUGAGACAGCUUGGCUGGG | 1274 |
| 1729 | GUGACAAACCCAUACCCUU | 951 | 1729 | GUGACAAACCCAUACCCUU | 951 | 1751 | AAGGGUAUGGGUUUGUCAC | 1275 |
| 1747 | UGUGAAGAAUGGAGAAGUG | 952 | 1747 | UGUGAAGAAUGGAGAAGUG | 952 | 1769 | CACUUCUCCAUUCUUCACA | 1276 |
| 1765 | GUGGAGGACUUCCAGGGAG | 953 | 1765 | GUGGAGGACUUCCAGGGAG | 953 | 1787 | CUCCCUGGAAGUCCUCCAC | 1277 |
| 1783 | GGAAAUAAAAUUGAAGUUA | 954 | 1783 | GGAAAUAAAAUUGAAGUUA | 954 | 1805 | UAACUUCAAUUUUAUUUCC | 1278 |
| 1801 | AAUAAAAAUCAAUUUGCUC | 955 | 1801 | AAUAAAAAUCAAUUUGCUC | 955 | 1823 | GAGCAAAUUGAUUUUUAUU | 1279 |
| 1819 | CUAAUUGAAGGAAAAAACA | 956 | 1819 | CUAAUUGAAGGAAAAAACA | 956 | 1841 | UGUUUUUUCCUUCAAUUAG | 1280 |
| 1837 | AAAACUGUAAGUACCCUUG | 957 | 1837 | AAAACUGUAAGUACCCUUG | 957 | 1859 | CAAGGGUACUUACAGUUUU | 1281 |
| 1855 | GUUAUCCAAGCGGCAAAUG | 958 | 1855 | GUUAUCCAAGCGGCAAAUG | 958 | 1877 | CAUUUGCCGCUUGGAUAAC | 1282 |
| 1873 | GUGUCAGCUUUGUACAAAU | 959 | 1873 | GUGUCAGCUUUGUACAAAU | 959 | 1895 | AUUUGUACAAAGCUGACAC | 1283 |
| 1891 | UGUGAAGCGGUCAACAAAG | 960 | 1891 | UGUGAAGCGGUCAACAAAG | 960 | 1913 | CUUUGUUGACCGCUUCACA | 1284 |
| 1909 | GUCGGGAGAGGAGAGAGGG | 961 | 1909 | GUCGGGAGAGGAGAGAGGG | 961 | 1931 | CCCUCUCUCCUCUCCCGAC | 1285 |
| 1927 | GUGAUCUCCUUCCACGUGA | 962 | 1927 | GUGAUCUCCUUCCACGUGA | 962 | 1949 | UCACGUGGAAGGAGAUCAC | 1286 |
| 1945 | ACCAGGGGUCCUGAAAUUA | 963 | 1945 | ACCAGGGGUCCUGAAAUUA | 963 | 1967 | UAAUUUCAGGACCCCUGGU | 1287 |
| 1963 | ACUUUGCAACCUGACAUGC | 964 | 1963 | ACUUUGCAACCUGACAUGC | 964 | 1985 | GCAUGUCAGGUUGCAAAGU | 1288 |
| 1981 | CAGCCCACUGAGCAGGAGA | 965 | 1981 | CAGCCCACUGAGCAGGAGA | 965 | 2003 | UCUCCUGCUCAGUGGGCUG | 1289 |
| 1999 | AGCGUGUCUUUGUGGUGCA | 966 | 1999 | AGCGUGUCUUUGUGGUGCA | 966 | 2021 | UGCACCACAAAGACACGCU | 1290 |
| 2017 | ACUGCAGACAGAUCUACGU | 967 | 2017 | ACUGCAGACAGAUCUACGU | 967 | 2039 | ACGUAGAUCUGUCUGCAGU | 1291 |
| 2035 | UUUGAGAACCUCACAUGGU | 968 | 2035 | UUUGAGAACCUCACAUGGU | 968 | 2057 | ACCAUGUGAGGUUCUCAAA | 1292 |
| 2053 | UACAAGCUUGGCCCACAGC | 969 | 2053 | UACAAGCUUGGCCCACAGC | 969 | 2075 | GCUGUGGGCCAAGCUUGUA | 1293 |
| 2071 | CCUCUGCCAAUCCAUGUGG | 970 | 2071 | CCUCUGCCAAUCCAUGUGG | 970 | 2093 | CCACAUGGAUUGGCAGAGG | 1294 |
| 2089 | GGAGAGUUGCCCACACCUG | 971 | 2089 | GGAGAGUUGCCCACACCUG | 971 | 2111 | CAGGUGUGGGCAACUCUCC | 1295 |
| 2107 | GUUUGCAAGAACUUGGAUA | 972 | 2107 | GUUUGCAAGAACUUGGAUA | 972 | 2129 | UAUCCAAGUUCUUGCAAAC | 1296 |
| 2125 | ACUCUUUGGAAAUUGAAUG | 973 | 2125 | ACUCUUUGGAAAUUGAAUG | 973 | 2147 | CAUUCAAUUUCCAAAGAGU | 1297 |
| 2143 | GCCACCAUGUUCUCUAAUA | 974 | 2143 | GCCACCAUGUUCUCUAAUA | 974 | 2165 | UAUUAGAGAACAUGGUGGC | 1298 |
| 2161 | AGCACAAAUGACAUUUUGA | 975 | 2161 | AGCACAAAUGACAUUUUGA | 975 | 2183 | UCAAAAUGUCAUUUGUGCU | 1299 |
| 2179 | AUCAUGGAGCUUAAGAAUG | 976 | 2179 | AUCAUGGAGCUUAAGAAUG | 976 | 2201 | CAUUCUUAAGCUCCAUGAU | 1300 |
| 2197 | GCAUCCUUGCAGGACCAAG | 977 | 2197 | GCAUCCUUGCAGGACCAAG | 977 | 2219 | CUUGGUCCUGCAAGGAUGC | 1301 |
| 2215 | GGAGACUAUGUCUGCCUUG | 978 | 2215 | GGAGACUAUGUCUGCCUUG | 978 | 2237 | CAAGGCAGACAUAGUCUCC | 1302 |
| 2233 | GCUCAAGACAGGAAGACCA | 979 | 2233 | GCUCAAGACAGGAAGACCA | 979 | 2255 | UGGUCUUCCUGUCUUGAGC | 1303 |
| 2251 | AAGAAAAGACAUUGCGUGG | 980 | 2251 | AAGAAAAGACAUUGCGUGG | 980 | 2273 | CCACGCAAUGUCUUUUCUU | 1304 |
| 2269 | GUCAGGCAGCUCACAGUCC | 981 | 2269 | GUCAGGCAGCUCACAGUCC | 981 | 2291 | GGACUGUGAGCUGCCUGAC | 1305 |
| 2287 | CUAGAGCGUGUGGCACCCA | 982 | 2287 | CUAGAGCGUGUGGCACCCA | 982 | 2309 | UGGGUGCCACACGCUCUAG | 1306 |
| 2305 | ACGAUCACAGGAAACCUGG | 983 | 2305 | ACGAUCACAGGAAACCUGG | 983 | 2327 | CCAGGUUUCCUGUGAUCGU | 1307 |
| 2323 | GAGAAUCAGACGACAAGUA | 984 | 2323 | GAGAAUCAGACGACAAGUA | 984 | 2345 | UACUUGUCGUCUGAUUCUC | 1308 |
| 2341 | AUUGGGGAAAGCAUCGAAG | 985 | 2341 | AUUGGGGAAAGCAUCGAAG | 985 | 2363 | CUUCGAUGCUUUCCCCAAU | 1309 |
| 2359 | GUCUCAUGCACGGCAUCUG | 986 | 2359 | GUCUCAUGCACGGCAUCUG | 986 | 2381 | CAGAUGCCGUGCAUGAGAC | 1310 |
| 2377 | GGGAAUCCCCCUCCACAGA | 987 | 2377 | GGGAAUCCCCCUCCACAGA | 987 | 2399 | UCUGUGGAGGGGGAUUCCC | 1311 |
| 2395 | AUCAUGUGGUUUAAAGAUA | 988 | 2395 | AUCAUGUGGUUUAAAGAUA | 988 | 2417 | UAUCUUUAAACCACAUGAU | 1312 |
| 2413 | AAUGAGACCCUUGUAGAAG | 989 | 2413 | AAUGAGACCCUUGUAGAAG | 989 | 2435 | CUUCUACAAGGGUCUCAUU | 1313 |
| 2431 | GACUCAGGCAUUGUAUUGA | 990 | 2431 | GACUCAGGCAUUGUAUUGA | 990 | 2453 | UCAAUACAAUGCCUGAGUC | 1314 |
| 2449 | AAGGAUGGGAACCGGAACC | 991 | 2449 | AAGGAUGGGAACCGGAACC | 991 | 2471 | GGUUCCGGUUCCCAUCCUU | 1315 |
| 2467 | CUCACUAUCCGCAGAGUGA | 992 | 2467 | CUCACUAUCCGCAGAGUGA | 992 | 2489 | UCACUCUGCGGAUAGUGAG | 1316 |
| 2485 | AGGAAGGAGGACGAAGGCC | 993 | 2485 | AGGAAGGAGGACGAAGGCC | 993 | 2507 | GGCCUUCGUCCUCCUUCCU | 1317 |
| 2503 | CUCUACACCUGCCAGGCAU | 994 | 2503 | CUCUACACCUGCCAGGCAU | 994 | 2525 | AUGCCUGGCAGGUGUAGAG | 1318 |
| 2521 | UGCAGUGUUCUUGGCUGUG | 995 | 2521 | UGCAGUGUUCUUGGCUGUG | 995 | 2543 | CACAGCCAAGAACACUGCA | 1319 |
| 2539 | GCAAAAGUGGAGGCAUUUU | 996 | 2539 | GCAAAAGUGGAGGCAUUUU | 996 | 2561 | AAAAUGCCUCCACUUUUGC | 1320 |
| 2557 | UUCAUAAUAGAAGGUGCCC | 997 | 2557 | UUCAUAAUAGAAGGUGCCC | 997 | 2579 | GGGCACCUUCUAUUAUGAA | 1321 |
| 2575 | CAGGAAAAGACGAACUUGG | 998 | 2575 | CAGGAAAAGACGAACUUGG | 998 | 2597 | CCAAGUUCGUCUUUUCCUG | 1322 |
| 2593 | GAAAUCAUUAUUCUAGUAG | 999 | 2593 | GAAAUCAUUAUUCUAGUAG | 999 | 2615 | CUACUAGAAUAAUGAUUUC | 1323 |
| 2611 | GGCACGGCGGUGAUUGCCA | 1000 | 2611 | GGCACGGCGGUGAUUGCCA | 1000 | 2633 | UGGCAAUCACCGCCGUGCC | 1324 |
| 2629 | AUGUUCUUCUGGCUACUUC | 1001 | 2629 | AUGUUCUUCUGGCUACUUC | 1001 | 2651 | GAAGUAGCCAGAAGAACAU | 1325 |
| 2647 | CUUGUCAUCAUCCUACGGA | 1002 | 2647 | CUUGUCAUCAUCCUACGGA | 1002 | 2669 | UCCGUAGGAUGAUGACAAG | 1326 |
| 2665 | ACCGUUAAGCGGGCCAAUG | 1003 | 2665 | ACCGUUAAGCGGGCCAAUG | 1003 | 2687 | CAUUGGCCCGCUUAACGGU | 1327 |
| 2683 | GGAGGGGAACUGAAGACAG | 1004 | 2683 | GGAGGGGAACUGAAGACAG | 1004 | 2705 | CUGUCUUCAGUUCCCCUCC | 1328 |
| 2701 | GGCUACUUGUCCAUCGUCA | 1005 | 2701 | GGCUACUUGUCCAUCGUCA | 1005 | 2723 | UGACGAUGGACAAGUAGCC | 1329 |
| 2719 | AUGGAUCCAGAUGAACUCC | 1006 | 2719 | AUGGAUCCAGAUGAACUCC | 1006 | 2741 | GGAGUUCAUCUGGAUCCAU | 1330 |
| 2737 | CCAUUGGAUGAACAUUGUG | 1007 | 2737 | CCAUUGGAUGAACAUUGUG | 1007 | 2759 | CACAAUGUUCAUCCAAUGG | 1331 |
| 2755 | GAACGACUGCCUUAUGAUG | 1008 | 2755 | GAACGACUGCCUUAUGAUG | 1008 | 2777 | CAUCAUAAGGCAGUCGUUC | 1332 |
| 2773 | GCCAGCAAAUGGGAAUUCC | 1009 | 2773 | GCCAGCAAAUGGGAAUUCC | 1009 | 2795 | GGAAUUCCCAUUUGCUGGC | 1333 |
| 2791 | CCCAGAGACCGGCUGAAGC | 1010 | 2791 | CCCAGAGACCGGCUGAAGC | 1010 | 2813 | GCUUCAGCCGGUCUCUGGG | 1334 |
| 2809 | CUAGGUAAGCCUCUUGGCC | 1011 | 2809 | CUAGGUAAGCCUCUUGGCC | 1011 | 2831 | GGCCAAGAGGCUUACCUAG | 1335 |
| 2827 | CGUGGUGCCUUUGGCCAAG | 1012 | 2827 | CGUGGUGCCUUUGGCCAAG | 1012 | 2849 | CUUGGCCAAAGGCACCACG | 1336 |
| 2845 | GUGAUUGAAGCAGAUGCCU | 1013 | 2845 | GUGAUUGAAGCAGAUGCCU | 1013 | 2867 | AGGCAUCUGCUUCAAUCAC | 1337 |
| 2863 | UUUGGAAUUGACAAGACAG | 1014 | 2863 | UUUGGAAUUGACAAGACAG | 1014 | 2885 | CUGUCUUGUCAAUUCCAAA | 1338 |
| 2881 | GCAACUUGCAGGACAGUAG | 1015 | 2881 | GCAACUUGCAGGACAGUAG | 1015 | 2903 | CUACUGUCCUGCAAGUUGC | 1339 |
| 2899 | GCAGUCAAAAUGUUGAAAG | 1016 | 2899 | GCAGUCAAAAUGUUGAAAG | 1016 | 2921 | CUUUCAACAUUUUGACUGC | 1340 |
| 2917 | GAAGGAGCAACACACAGUG | 1017 | 2917 | GAAGGAGCAACACACAGUG | 1017 | 2939 | CACUGUGUGUUGCUCCUUC | 1341 |
| 2935 | GAGCAUCGAGCUCUCAUGU | 1018 | 2935 | GAGCAUCGAGCUCUCAUGU | 1018 | 2957 | ACAUGAGAGCUCGAUGCUC | 1342 |
| 2953 | UCUGAACUCAAGAUCCUCA | 1019 | 2953 | UCUGAACUCAAGAUCCUCA | 1019 | 2975 | UGAGGAUCUUGAGUUCAGA | 1343 |
| 2971 | AUUCAUAUUGGUCACCAUC | 1020 | 2971 | AUUCAUAUUGGUCACCAUC | 1020 | 2993 | GAUGGUGACCAAUAUGAAU | 1344 |
| 2989 | CUCAAUGUGGUCAACCUUC | 1021 | 2989 | CUCAAUGUGGUCAACCUUC | 1021 | 3011 | GAAGGUUGACCACAUUGAG | 1345 |
| 3007 | CUAGGUGCCUGUACCAAGC | 1022 | 3007 | CUAGGUGCCUGUACCAAGC | 1022 | 3029 | GCUUGGUACAGGCACCUAG | 1346 |
| 3025 | CCAGGAGGGCCACUCAUGG | 1023 | 3025 | CCAGGAGGGCCACUCAUGG | 1023 | 3047 | CCAUGAGUGGCCCUCCUGG | 1347 |
| 3043 | GUGAUUGUGGAAUUCUGCA | 1024 | 3043 | GUGAUUGUGGAAUUCUGCA | 1024 | 3065 | UGCAGAAUUCCACAAUCAC | 1348 |
| 3061 | AAAUUUGGAAACCUGUCCA | 1025 | 3061 | AAAUUUGGAAACCUGUCCA | 1025 | 3083 | UGGACAGGUUUCCAAAUUU | 1349 |
| 3079 | ACUUACCUGAGGAGCAAGA | 1026 | 3079 | ACUUACCUGAGGAGCAAGA | 1026 | 3101 | UCUUGCUCCUCAGGUAAGU | 1350 |
| 3097 | AGAAAUGAAUUUGUCCCCU | 1027 | 3097 | AGAAAUGAAUUUGUCCCCU | 1027 | 3119 | AGGGGACAAAUUCAUUUCU | 1351 |
| 3115 | UACAAGACCAAAGGGGCAC | 1028 | 3115 | UACAAGACCAAAGGGGCAC | 1028 | 3137 | GUGCCCCUUUGGUCUUGUA | 1352 |
| 3133 | CGAUUCCGUCAAGGGAAAG | 1029 | 3133 | CGAUUCCGUCAAGGGAAAG | 1029 | 3155 | CUUUCCCUUGACGGAAUCG | 1353 |
| 3151 | GACUACGUUGGAGCAAUCC | 1030 | 3151 | GACUACGUUGGAGCAAUCC | 1030 | 3173 | GGAUUGCUCCAACGUAGUC | 1354 |
| 3169 | CCUGUGGAUCUGAAACGGC | 1031 | 3169 | CCUGUGGAUCUGAAACGGC | 1031 | 3191 | GCCGUUUCAGAUCCACAGG | 1355 |
| 3187 | CGCUUGGACAGCAUCACCA | 1032 | 3187 | CGCUUGGACAGCAUCACCA | 1032 | 3209 | UGGUGAUGCUGUCCAAGCG | 1356 |
| 3205 | AGUAGCCAGAGCUCAGCCA | 1033 | 3205 | AGUAGCCAGAGCUCAGCCA | 1033 | 3227 | UGGCUGAGCUCUGGCUACU | 1357 |
| 3223 | AGCUCUGGAUUUGUGGAGG | 1034 | 3223 | AGCUCUGGAUUUGUGGAGG | 1034 | 3245 | CCUCCACAAAUCCAGAGCU | 1358 |
| 3241 | GAGAAGUCCCUCAGUGAUG | 1035 | 3241 | GAGAAGUCCCUCAGUGAUG | 1035 | 3263 | CAUCACUGAGGGACUUCUC | 1359 |
| 3259 | GUAGAAGAAGAGGAAGCUC | 1036 | 3259 | GUAGAAGAAGAGGAAGCUC | 1036 | 3281 | GAGCUUCCUCUUCUUCUAC | 1360 |
| 3277 | CCUGAAGAUCUGUAUAAGG | 1037 | 3277 | CCUGAAGAUCUGUAUAAGG | 1037 | 3299 | CCUUAUACAGAUCUUCAGG | 1361 |
| 3295 | GACUUCCUGACCUUGGAGC | 1038 | 3295 | GACUUCCUGACCUUGGAGC | 1038 | 3317 | GCUCCAAGGUCAGGAAGUC | 1362 |
| 3313 | CAUCUCAUCUGUUACAGCU | 1039 | 3313 | CAUCUCAUCUGUUACAGCU | 1039 | 3335 | AGCUGUAACAGAUGAGAUG | 1363 |
| 3331 | UUCCAAGUGGCUAAGGGCA | 1040 | 3331 | UUCCAAGUGGCUAAGGGCA | 1040 | 3353 | UGCCCUUAGCCACUUGGAA | 1364 |
| 3349 | AUGGAGUUCUUGGCAUCGC | 1041 | 3349 | AUGGAGUUCUUGGCAUCGC | 1041 | 3371 | GCGAUGCCAAGAACUCCAU | 1365 |
| 3367 | CGAAAGUGUAUCCACAGGG | 1042 | 3367 | CGAAAGUGUAUCCACAGGG | 1042 | 3389 | CCCUGUGGAUACACUUUCG | 1366 |
| 3385 | GACCUGGCGGCACGAAAUA | 1043 | 3385 | GACCUGGCGGCACGAAAUA | 1043 | 3407 | UAUUUCGUGCCGCCAGGUC | 1367 |
| 3403 | AUCCUCUUAUCGGAGAAGA | 1044 | 3403 | AUCCUCUUAUCGGAGAAGA | 1044 | 3425 | UCUUCUCCGAUAAGAGGAU | 1368 |
| 3421 | AACGUGGUUAAAAUCUGUG | 1045 | 3421 | AACGUGGUUAAAAUCUGUG | 1045 | 3443 | CACAGAUUUUAACCACGuU | 1369 |
| 3439 | GACUUUGGCUUGGCCCGGG | 1046 | 3439 | GACUUUGGCUUGGCCCGGG | 1046 | 3461 | CCCGGGCCAAGCCAAAGUC | 1370 |
| 3457 | GAUAUUUAUAAAGAUCCAG | 1047 | 3457 | GAUAUUUAUAAAGAUCCAG | 1047 | 3479 | CUGGAUCUUUAUAAAUAUC | 1371 |
| 3475 | GAUUAUGUCAGAAAAGGAG | 1048 | 3475 | GAUUAUGUCAGAAAAGGAG | 1048 | 3497 | CUCCUUUUCUGACAUAAUC | 1372 |
| 3493 | GAUGCUCGCCUCCCUUUGA | 1049 | 3493 | GAUGCUCGCCUCCCUUUGA | 1049 | 3515 | UCAAAGGGAGGCGAGCAUC | 1373 |
| 3511 | AAAUGGAUGGCCCCAGAAA | 1050 | 3511 | AAAUGGAUGGCCCCAGAAA | 1050 | 3533 | UUUCUGGGGCCAUCCAUUU | 1374 |
| 3529 | ACAAUUUUUGACAGAGUGU | 1051 | 3529 | ACAAUUUUUGACAGAGUGU | 1051 | 3551 | ACACUCUGUCAAAAAUUGU | 1375 |
| 3547 | UACACAAUCCAGAGUGACG | 1052 | 3547 | UACACAAUCCAGAGUGACG | 1052 | 3569 | CGUCACUCUGGAUUGUGUA | 1376 |
| 3565 | GUCUGGUCUUUUGGUGUUU | 1053 | 3565 | GUCUGGUCUUUUGGUGUUU | 1053 | 3587 | AAACACCAAAAGACCAGAC | 1377 |
| 3583 | UUGCUGUGGGAAAUAUUUU | 1054 | 3583 | UUGCUGUGGGAAAUAUUUU | 1054 | 3605 | AAAAUAUUUCCCACAGCAA | 1378 |
| 3601 | UCCUUAGGUGCUUCUCCAU | 1055 | 3601 | UCCUUAGGUGCUUCUCCAU | 1055 | 3623 | AUGGAGAAGCACCUAAGGA | 1379 |
| 3619 | UAUCCUGGGGUAAAGAUUG | 1056 | 3619 | UAUCCUGGGGUAAAGAUUG | 1056 | 3641 | CAAUCUUUACCCCAGGAUA | 1380 |
| 3637 | GAUGAAGAAUUUUGUAGGC | 1057 | 3637 | GAUGAAGAAUUUUGUAGGC | 1057 | 3659 | GCCUACAAAAUUCUUCAUC | 1381 |
| 3655 | CGAUUGAAAGAAGGAACUA | 1058 | 3655 | CGAUUGAAAGAAGGAACUA | 1058 | 3677 | UAGUUCCUUCUUUCAAUCG | 1382 |
| 3673 | AGAAUGAGGGCCCCUGAUU | 1059 | 3673 | AGAAUGAGGGCCCCUGAUU | 1059 | 3695 | AAUCAGGGGCCCUCAUUCU | 1383 |
| 3691 | UAUACUACACCAGAAAUGU | 1060 | 3691 | UAUACUACACCAGAAAUGU | 1060 | 3713 | ACAUUUCUGGUGUAGUAUA | 1384 |
| 3709 | UACCAGACCAUGCUGGACU | 1061 | 3709 | UACCAGACCAUGCUGGACU | 1061 | 3731 | AGUCCAGCAUGGUCUGGUA | 1385 |
| 3727 | UGCUGGCACGGGGAGCCCA | 1062 | 3727 | UGCUGGCACGGGGAGCCCA | 1062 | 3749 | UGGGCUCCCCGUGCCAGCA | 1386 |
| 3745 | AGUCAGAGACCCACGUUUU | 1063 | 3745 | AGUCAGAGACCCACGUUUU | 1063 | 3767 | AAAACGUGGGUCUCUGACU | 1387 |
| 3763 | UCAGAGUUGGUGGAACAUU | 1064 | 3763 | UCAGAGUUGGUGGAACAUU | 1064 | 3785 | AAUGUUCCACCAACUCUGA | 1388 |
| 3781 | UUGGGAAAUCUCUUGCAAG | 1065 | 3781 | UUGGGAAAUCUCUUGCAAG | 1065 | 3803 | CUUGCAAGAGAUUUCCCAA | 1389 |
| 3799 | GCUAAUGCUCAGCAGGAUG | 1066 | 3799 | GCUAAUGCUCAGCAGGAUG | 1066 | 3821 | CAUCCUGCUGAGCAUUAGC | 1390 |
| 3817 | GGCAAAGACUACAUUGUUC | 1067 | 3817 | GGCAAAGACUACAUUGUUC | 1067 | 3839 | GAACAAUGUAGUCUUUGCC | 1391 |
| 3835 | CUUCCGAUAUCAGAGACUU | 1068 | 3835 | CUUCCGAUAUCAGAGACUU | 1068 | 3857 | AAGUCUCUGAUAUCGGAAG | 1392 |
| 3853 | UUGAGCAUGGAAGAGGAUU | 1069 | 3853 | UUGAGCAUGGAAGAGGAUU | 1069 | 3875 | AAUCCUCUUCCAUGCUCAA | 1393 |
| 3871 | UCUGGACUCUCUCUGCCUA | 1070 | 3871 | UCUGGACUCUCUCUGCCUA | 1070 | 3893 | UAGGCAGAGAGAGUCCAGA | 1394 |
| 3889 | ACCUCACCUGUUUCCUGUA | 1071 | 3889 | ACCUCACCUGUUUCCUGUA | 1071 | 3911 | UACAGGAAACAGGUGAGGU | 1395 |
| 3907 | AUGGAGGAGGAGGAAGUAU | 1072 | 3907 | AUGGAGGAGGAGGAAGUAU | 1072 | 3929 | AUACUUCCUCCUCCUCCAU | 1396 |
| 3925 | UGUGACCCCAAAUUCCAUU | 1073 | 3925 | UGUGACCCCAAAUUCCAUU | 1073 | 3947 | AAUGGAAUUUGGGGUCACA | 1397 |
| 3943 | UAUGACAACACAGCAGGAA | 1074 | 3943 | UAUGACAACACAGCAGGAA | 1074 | 3965 | UUCCUGCUGUGUUGUCAUA | 1398 |
| 3961 | AUCAGUCAGUAUCUGCAGA | 1075 | 3961 | AUCAGUCAGUAUCUGCAGA | 1075 | 3983 | UCUGCAGAUACUGACUGAU | 1399 |
| 3979 | AACAGUAAGCGAAAGAGCC | 1076 | 3979 | AACAGUAAGCGAAAGAGCC | 1076 | 4001 | GGCUCUUUCGCUUACUGUU | 1400 |
| 3997 | CGGCCUGUGAGUGUAAAAA | 1077 | 3997 | CGGCCUGUGAGUGUAAAAA | 1077 | 4019 | UUUUUACACUCACAGGCCG | 1401 |
| 4015 | ACAUUUGAAGAUAUCCCGU | 1078 | 4015 | ACAUUUGAAGAUAUCCCGU | 1078 | 4037 | ACGGGAUAUCUUCAAAUGU | 1402 |
| 4033 | UUAGAAGAACCAGAAGUAA | 1079 | 4033 | UUAGAAGAACCAGAAGUAA | 1079 | 4055 | UUACUUCUGGUUCUUCUAA | 1403 |
| 4051 | AAAGUAAUCCCAGAUGACA | 1080 | 4051 | AAAGUAAUCCCAGAUGACA | 1080 | 4073 | UGUCAUCUGGGAUUACUUU | 1404 |
| 4069 | AACCAGACGGACAGUGGUA | 1081 | 4069 | AACCAGACGGACAGUGGUA | 1081 | 4091 | UACCACUGUCCGUCUGGUU | 1405 |
| 4087 | AUGGUUCUUGCCUCAGAAG | 1082 | 4087 | AUGGUUCUUGCCUCAGAAG | 1082 | 4109 | CUUCUGAGGCAAGAACCAU | 1406 |
| 4105 | GAGCUGAAAACUUUGGAAG | 1083 | 4105 | GAGCUGAAAACUUUGGAAG | 1083 | 4127 | CUUCCAAAGUUUUCAGCUC | 1407 |
| 4123 | GACAGAACCAAAUUAUCUC | 1084 | 4123 | GACAGAACCAAAUUAUCUC | 1084 | 4145 | GAGAUAAUUUGGUUCUGUC | 1408 |
| 4141 | CCAUCUUUUGGUGGAAUGG | 1085 | 4141 | CCAUCUUUUGGUGGAAUGG | 1085 | 4163 | CCAUUCCACCAAAAGAUGG | 1409 |
| 4159 | GUGCCCAGCAAAAGCAGGG | 1086 | 4159 | GUGCCCAGCAAAAGCAGGG | 1086 | 4181 | CCCUGCUUUUGCUGGGCAC | 1410 |
| 4177 | GAGUCUGUGGCAUCUGAAG | 1087 | 4177 | GAGUCUGUGGCAUCUGAAG | 1087 | 4199 | CUUCAGAUGCCACAGACUC | 1411 |
| 4195 | GGCUCAAACCAGACAAGCG | 1088 | 4195 | GGCUCAAACCAGACAAGCG | 1088 | 4217 | CGCUUGUCUGGUUUGAGCC | 1412 |
| 4213 | GGCUACCAGUCCGGAUAUC | 1089 | 4213 | GGCUACCAGUCCGGAUAUC | 1089 | 4235 | GAUAUCCGGACUGGUAGCC | 1413 |
| 4231 | CACUCCGAUGACACAGACA | 1090 | 4231 | CACUCCGAUGACACAGACA | 1090 | 4253 | UGUCUGUGUCAUCGGAGUG | 1414 |
| 4249 | ACCACCGUGUACUCCAGUG | 1091 | 4249 | ACCACCGUGUACUCCAGUG | 1091 | 4271 | CACUGGAGUACACGGUGGU | 1415 |
| 4267 | GAGGAAGCAGAACUUUUAA | 1092 | 4267 | GAGGAAGCAGAACUUUUAA | 1092 | 4289 | UUAAAAGUUCUGCUUCCUC | 1416 |
| 4285 | AAGCUGAUAGAGAUUGGAG | 1093 | 4285 | AAGCUGAUAGAGAUUGGAG | 1093 | 4307 | CUCCAAUCUCUAUCAGCUU | 1417 |
| 4303 | GUGCAAACCGGUAGCACAG | 1094 | 4303 | GUGCAAACCGGUAGCACAG | 1094 | 4325 | CUGUGCUACCGGUUUGCAC | 1418 |
| 4321 | GCCCAGAUUCUCCAGCCUG | 1095 | 4321 | GCCCAGAUUCUCCAGCCUG | 1095 | 4343 | CAGGCUGGAGAAUCUGGGC | 1419 |
| 4339 | GACUCGGGGACCACACUGA | 1096 | 4339 | GACUCGGGGACCACACUGA | 1096 | 4361 | UCAGUGUGGUCCCCGAGUC | 1420 |
| 4357 | AGCUCUCCUCCUGUUUAAA | 1097 | 4357 | AGCUCUCCUCCUGUUUAAA | 1097 | 4379 | UUUAAACAGGAGGAGAGCU | 1421 |
| 4375 | AAGGAAGCAUCCACACCCC | 1098 | 4375 | AAGGAAGCAUCCACACCCC | 1098 | 4397 | GGGGUGUGGAUGCUUCCUU | 1422 |
| 4393 | CAACUCCCGGACAUCACAU | 1099 | 4393 | CAACUCCCGGACAUCACAU | 1099 | 4415 | AUGUGAUGUCCGGGAGUUG | 1423 |
| 4411 | UGAGAGGUCUGCUCAGAUU | 1100 | 4411 | UGAGAGGUCUGCUCAGAUU | 1100 | 4433 | AAUCUGAGCAGACCUCUCA | 1424 |
| 4429 | UUUGAAGUGUUGUUCUUUC | 1101 | 4429 | UUUGAAGUGUUGUUCUUUC | 1101 | 4451 | GAAAGAACAACACUUCAAA | 1425 |
| 4447 | CCACCAGCAGGAAGUAGCC | 1102 | 4447 | CCACCAGCAGGAAGUAGCC | 1102 | 4469 | GGCUACUUCCUGCUGGUGG | 1426 |
| 4465 | CGCAUUUGAUUUUCAUUUC | 1103 | 4465 | CGCAUUUGAUUUUCAUUUC | 1103 | 4487 | GAAAUGAAAAUCAAAUGCG | 1427 |
| 4483 | CGACAACAGAAAAAGGACC | 1104 | 4483 | CGACAACAGAAAAAGGACC | 1104 | 4505 | GGUCCUUUUUCUGUUGUCG | 1428 |
| 4501 | CUCGGACUGCAGGGAGCCA | 1105 | 4501 | CUCGGACUGCAGGGAGCCA | 1105 | 4523 | UGGCUCCCUGCAGUCCGAG | 1429 |
| 4519 | AGUCUUCUAGGCAUAUCCU | 1106 | 4519 | AGUCUUCUAGGCAUAUCCU | 1106 | 4541 | AGGAUAUGCCUAGAAGACU | 1430 |
| 4537 | UGGAAGAGGCUUGUGACCC | 1107 | 4537 | UGGAAGAGGCUUGUGACCC | 1107 | 4559 | GGGUCACAAGCCUCUUCCA | 1431 |
| 4555 | CAAGAAUGUGUCUGUGUCU | 1108 | 4555 | CAAGAAUGUGUCUGUGUCU | 1108 | 4577 | AGACACAGACACAUUCUUG | 1432 |
| 4573 | UUCUCCCAGUGUUGACCUG | 1109 | 4573 | UUCUCCCAGUGUUGACCUG | 1109 | 4595 | CAGGUCAACACUGGGAGAA | 1433 |
| 4591 | GAUCCUCUUUUUUCAUUCA | 1110 | 4591 | GAUCCUCUUUUUUCAUUCA | 1110 | 4613 | UGAAUGAAAAAAGAGGAUC | 1434 |
| 4609 | AUUUAAAAAGCAUUAUCAU | 1111 | 4609 | AUUUAAAAAGCAUUAUCAU | 1111 | 4631 | AUGAUAAUGCUUUUUAAAU | 1435 |
| 4627 | UGCCCCUGCUGCGGGUCUC | 1112 | 4627 | UGCCCCUGCUGCGGGUCUC | 1112 | 4649 | GAGACCCGCAGCAGGGGCA | 1436 |
| 4645 | CACCAUGGGUUUAGAACAA | 1113 | 4645 | CACCAUGGGUUUAGAACAA | 1113 | 4667 | UUGUUCUAAACCCAUGGUG | 1437 |
| 4663 | AAGAGCUUCAAGCAAUGGC | 1114 | 4663 | AAGAGCUUCAAGCAAUGGC | 1114 | 4685 | GCCAUUGCUUGAAGCUCUU | 1438 |
| 4681 | CCCCAUCCUCAAAGAAGUA | 1115 | 4681 | CCCCAUCCUCAAAGAAGUA | 1115 | 4703 | UACUUCUUUGAGGAUGGGG | 1439 |
| 4699 | AGCAGUACCUGGGGAGCUG | 1116 | 4699 | AGCAGUACCUGGGGAGCUG | 1116 | 4721 | CAGCUCCCCAGGUACUGCU | 1440 |
| 4717 | GACACUUCUGUAAAACUAG | 1117 | 4717 | GACACUUCUGUAAAACUAG | 1117 | 4739 | CUAGUUUUACAGAAGUGUC | 1441 |
| 4735 | GAAGAUAAACCAGGCAACG | 1118 | 4735 | GAAGAUAAACCAGGCAACG | 1118 | 4757 | CGUUGCCUGGUUUAUCUUC | 1442 |
| 4753 | GUAAGUGUUCGAGGUGUUG | 1119 | 4753 | GUAAGUGUUCGAGGUGUUG | 1119 | 4775 | CAACACCUCGAACACUUAC | 1443 |
| 4771 | GAAGAUGGGAAGGAUUUGC | 1120 | 4771 | GAAGAUGGGAAGGAUUUGC | 1120 | 4793 | GCAAAUCCUUCCCAUCUUC | 1444 |
| 4789 | CAGGGCUGAGUCUAUCCAA | 1121 | 4789 | CAGGGCUGAGUCUAUCCAA | 1121 | 4811 | UUGGAUAGACUCAGCCCUG | 1445 |
| 4807 | AGAGGCUUUGUUUAGGACG | 1122 | 4807 | AGAGGCUUUGUUUAGGACG | 1122 | 4829 | CGUCCUAAACAAAGCCUCU | 1446 |
| 4825 | GUGGGUCCCAAGCCAAGCC | 1123 | 4825 | GUGGGUCCCAAGCCAAGCC | 1123 | 4847 | GGCUUGGCUUGGGACCCAC | 1447 |
| 4843 | CUUAAGUGUGGAAUUCGGA | 1124 | 4843 | CUUAAGUGUGGAAUUCGGA | 1124 | 4865 | UCCGAAUUCCACACUUAAG | 1448 |
| 4861 | AUUGAUAGAAAGGAAGACU | 1125 | 4861 | AUUGAUAGAAAGGAAGACU | 1125 | 4883 | AGUCUUCCUUUCUAUCAAU | 1449 |
| 4879 | UAACGUUACCUUGCUUUGG | 1126 | 4879 | UAACGUUACCUUGCUUUGG | 1126 | 4901 | CCAAAGCAAGGUAACGUUA | 1450 |
| 4897 | GAGAGUACUGGAGCCUGCA | 1127 | 4897 | GAGAGUACUGGAGCCUGCA | 1127 | 4919 | UGCAGGCUCCAGUACUCUC | 1451 |
| 4915 | AAAUGCAUUGUGUUUGCUC | 1128 | 4915 | AAAUGCAUUGUGUUUGCUC | 1128 | 4937 | GAGCAAACACAAUGCAUUU | 1452 |
| 4933 | CUGGUGGAGGUGGGCAUGG | 1129 | 4933 | CUGGUGGAGGUGGGCAUGG | 1129 | 4955 | CCAUGCCCACCUCCACCAG | 1453 |
| 4951 | GGGUCUGUUCUGAAAUGUA | 1130 | 4951 | GGGUCUGUUCUGAAAUGUA | 1130 | 4973 | UACAUUUCAGAACAGACCC | 1454 |
| 4969 | AAAGGGUUCAGACGGGGUU | 1131 | 4969 | AAAGGGUUCAGACGGGGUU | 1131 | 4991 | AACCCCGUCUGAACCCUUU | 1455 |
| 4987 | UUCUGGUUUUAGAAGGUUG | 1132 | 4987 | UUCUGGUUUUAGAAGGUUG | 1132 | 5009 | CAACCUUCUAAAACCAGAA | 1456 |
| 5005 | GCGUGUUCUUCGAGUUGGG | 1133 | 5005 | GCGUGUUCUUCGAGUUGGG | 1133 | 5027 | CCCAACUCGAAGAACACGC | 1457 |
| 5023 | GCUAAAGUAGAGUUCGUUG | 1134 | 5023 | GCUAAAGUAGAGUUCGUUG | 1134 | 5045 | CAACGAACUCUACUUUAGC | 1458 |
| 5041 | GUGCUGUUUCUGACUCCUA | 1135 | 5041 | GUGCUGUUUCUGACUCCUA | 1135 | 5063 | UAGGAGUCAGAAACAGCAC | 1459 |
| 5059 | AAUGAGAGUUCCUUCCAGA | 1136 | 5059 | AAUGAGAGUUCCUUCCAGA | 1136 | 5081 | UCUGGAAGGAACUCUCAUU | 1460 |
| 5077 | ACCGUUAGCUGUCUCCUUG | 1137 | 5077 | ACCGUUAGCUGUCUCCUUG | 1137 | 5099 | CAAGGAGACAGCUAACGGU | 1461 |
| 5095 | GCCAAGCCCCAGGAAGAAA | 1138 | 5095 | GCCAAGCCCCAGGAAGAAA | 1138 | 5117 | UUUCUUCCUGGGGCUUGGC | 1462 |
| 5113 | AAUGAUGCAGCUCUGGCUC | 1139 | 5113 | AAUGAUGCAGCUCUGGCUC | 1139 | 5135 | GAGCCAGAGCUGCAUCAUU | 1463 |
| 5131 | CCUUGUCUCCCAGGCUGAU | 1140 | 5131 | CCUUGUCUCCCAGGCUGAU | 1140 | 5153 | AUCAGCCUGGGAGACAAGG | 1464 |
| 5149 | UCCUUUAUUCAGAAUACCA | 1141 | 5149 | UCCUUUAUUCAGAAUACCA | 1141 | 5171 | UGGUAUUCUGAAUAAAGGA | 1465 |
| 5167 | ACAAAGAAAGGACAUUCAG | 1142 | 5167 | ACAAAGAAAGGACAUUCAG | 1142 | 5189 | CUGAAUGUCCUUUCUUUGU | 1466 |
| 5185 | GCUCAAGGCUCCCUGCCGU | 1143 | 5185 | GCUCAAGGCUCCCUGCCGU | 1143 | 5207 | ACGGCAGGGAGCCUUGAGC | 1467 |
| 5203 | UGUUGAAGAGUUCUGACUG | 1144 | 5203 | UGUUGAAGAGUUCUGACUG | 1144 | 5225 | CAGUCAGAACUCUUCAACA | 1468 |
| 5221 | GCACAAACCAGCUUCUGGU | 1145 | 5221 | GCACAAACCAGCUUCUGGU | 1145 | 5243 | ACCAGAAGCUGGUUUGUGC | 1469 |
| 5239 | UUUCUUCUGGAAUGAAUAC | 1146 | 5239 | UUUCUUCUGGAAUGAAUAC | 1146 | 5261 | GUAUUCAUUCCAGAAGAAA | 1470 |
| 5257 | CCCUCAUAUCUGUCCUGAU | 1147 | 5257 | CCCUCAUAUCUGUCCUGAU | 1147 | 5279 | AUCAGGACAGAUAUGAGGG | 1471 |
| 5275 | UGUGAUAUGUCUGAGACUG | 1148 | 5275 | UGUGAUAUGUCUGAGACUG | 1148 | 5297 | CAGUCUCAGACAUAUCACA | 1472 |
| 5293 | GAAUGCGGGAGGUUCAAUG | 1149 | 5293 | GAAUGCGGGAGGUUCAAUG | 1149 | 5315 | CAUUGAACCUCCCGCAUUC | 1473 |
| 5311 | GUGAAGCUGUGUGUGGUGU | 1150 | 5311 | GUGAAGCUGUGUGUGGUGU | 1150 | 5333 | ACACCACACACAGCUUCAC | 1474 |
| 5329 | UCAAAGUUUCAGGAAGGAU | 1151 | 5329 | UCAAAGUUUCAGGAAGGAU | 1151 | 5351 | AUCCUUCCUGAAACUUUGA | 1475 |
| 5347 | UUUUACCCUUUUGUUCUUC | 1152 | 5347 | UUUUACCCUUUUGUUCUUC | 1152 | 5369 | GAAGAACAAAAGGGUAAAA | 1476 |
| 5365 | CCCCCUGUCCCCAACCCAC | 1153 | 5365 | CCCCCUGUCCCCAACCCAC | 1153 | 5387 | GUGGGUUGGGGACAGGGGG | 1477 |
| 5383 | CUCUCACCCCGCAACCCAU | 1154 | 5383 | CUCUCACCCCGCAACCCAU | 1154 | 5405 | AUGGGUUGCGGGGUGAGAG | 1478 |
| 5401 | UCAGUAUUUUAGUUAUUUG | 1155 | 5401 | UCAGUAUUUUAGUUAUUUG | 1155 | 5423 | CAAAUAACUAAAAUACUGA | 1479 |
| 5419 | GGCCUCUACUCCAGUAAAC | 1156 | 5419 | GGCCUCUACUCCAGUAAAC | 1156 | 5441 | GUUUACUGGAGUAGAGGCC | 1480 |
| 5437 | CCUGAUUGGGUUUGUUCAC | 1157 | 5437 | CCUGAUUGGGUUUGUUCAC | 1157 | 5459 | GUGAACAAACCCAAUCAGG | 1481 |
| 5455 | CUCUCUGAAUGAUUAUUAG | 1158 | 5455 | CUCUCUGAAUGAUUAUUAG | 1158 | 5477 | CUAAUAAUCAUUCAGAGAG | 1482 |
| 5473 | GCCAGACUUCAAAAUUAUU | 1159 | 5473 | GCCAGACUUCAAAAUUAUU | 1159 | 5495 | AAUAAUUUUGAAGUCUGGC | 1483 |
| 5491 | UUUAUAGCCCAAAUUAUAA | 1160 | 5491 | UUUAUAGCCCAAAUUAUAA | 1160 | 5513 | UUAUAAUUUGGGCUAUAAA | 1484 |
| 5509 | ACAUCUAUUGUAUUAUUUA | 1161 | 5509 | ACAUCUAUUGUAUUAUUUA | 1161 | 5531 | UAAAUAAUACAAUAGAUGU | 1485 |
| 5527 | AGACUUUUAACAUAUAGAG | 1162 | 5527 | AGACUUUUAACAUAUAGAG | 1162 | 5549 | CUCUAUAUGUUAAAAGUCU | 1486 |
| 5545 | GCUAUUUCUACUGAUUUUU | 1163 | 5545 | GCUAUUUCUACUGAUUUUU | 1163 | 5567 | AAAAAUCAGUAGAAAUAGC | 1487 |
| 5563 | UGCCCUUGUUCUGUCCUUU | 1164 | 5563 | UGCCCUUGUUCUGUCCUUU | 1164 | 5585 | AAAGGACAGAACAAGGGCA | 1488 |
| 5581 | UUUUUCAAAAAAGAAAAUG | 1165 | 5581 | UUUUUCAAAAAAGAAAAUG | 1165 | 5603 | CAUUUUCUUUUUUGAAAAA | 1489 |
| 5599 | GUGUUUUUUGUUUGGUACC | 1166 | 5599 | GUGUUUUUUGUUUGGUACC | 1166 | 5621 | GGUACCAAACAAAAAACAC | 1490 |
| 5617 | CAUAGUGUGAAAUGCUGGG | 1167 | 5617 | CAUAGUGUGAAAUGCUGGG | 1167 | 5639 | CCCAGCAUUUCACACUAUG | 1491 |
| 5635 | GAACAAUGACUAUAAGACA | 1168 | 5635 | GAACAAUGACUAUAAGACA | 1168 | 5657 | UGUCUUAUAGUCAUUGUUC | 1492 |
| 5653 | AUGCUAUGGCACAUAUAUU | 1169 | 5653 | AUGCUAUGGCACAUAUAUU | 1169 | 5675 | AAUAUAUGUGCCAUAGCAU | 1493 |
| 5671 | UUAUAGUCUGUUUAUGUAG | 1170 | 5671 | UUAUAGUCUGUUUAUGUAG | 1170 | 5693 | CUACAUAAACAGACUAUAA | 1494 |
| 5689 | GAAACAAAUGUAAUAUAUU | 1171 | 5689 | GAAACAAAUGUAAUAUAUU | 1171 | 5711 | AAUAUAUUACAUUUGUUUC | 1495 |
| 5707 | UAAAGCCUUAUAUAUAAUG | 1172 | 5707 | UAAAGCCUUAUAUAUAAUG | 1172 | 5729 | CAUUAUAUAUAAGGCUUUA | 1496 |
| 5725 | GAACUUUGUACUAUUCACA | 1173 | 5725 | GAACUUUGUACUAUUCACA | 1173 | 5747 | UGUGAAUAGUACAAAGUUC | 1497 |
| 5743 | AUUUUGUAUCAGUAUUAUG | 1174 | 5743 | AUUUUGUAUCAGUAUUAUG | 1174 | 5765 | CAUAAUACUGAUACAAAAU | 1498 |
| 5761 | GUAGCAUAACAAAGGUCAU | 1175 | 5761 | GUAGCAUAACAAAGGUCAU | 1175 | 5783 | AUGACCUUUGUUAUGCUAC | 1499 |
| 5779 | UAAUGCUUUCAGCAAUUGA | 1176 | 5779 | UAAUGCUUUCAGCAAUUGA | 1176 | 5801 | UCAAUUGCUGAAAGCAUUA | 1500 |
| 5797 | AUGUCAUUUUAUUAAAGAA | 1177 | 5797 | AUGUCAUUUUAUUAAAGAA | 1177 | 5819 | UUCUUUAAUAAAAUGACAU | 1501 |
| 5812 | AGAACAUUGAAAAACUUGA | 1178 | 5812 | AGAACAUUGAAAAACUUGA | 1178 | 5834 | UCAAGUUUUUCAAUGUUCU | 1502 |
| VEGFR3 gi\|4503752\|ref\|NM_002020.1 | | | | | | | | |
| 1 | ACCCACGCGCAGCGGCCGG | 1503 | 1 | ACCCACGCGCAGCGGCCGG | 1503 | 23 | CCGGCCGCUGCGCGUGGGU | 1750 |
| 19 | GAGAUGCAGCGGGGCGCCG | 1504 | 19 | GAGAUGCAGCGGGGCGCCG | 1504 | 41 | CGGCGCCCCGCUGCAUCUC | 1751 |
| 37 | GCGCUGUGCCUGCGACUGU | 1505 | 37 | GCGCUGUGCCUGCGACUGU | 1505 | 59 | ACAGUCGCAGGCACAGCGC | 1752 |
| 55 | UGGCUCUGCCUGGGACUCC | 1506 | 55 | UGGCUCUGCCUGGGACUCC | 1506 | 77 | GGAGUCCCAGGCAGAGCCA | 1753 |
| 73 | CUGGACGGCCUGGUGAGUG | 1507 | 73 | CUGGACGGCCUGGUGAGUG | 1507 | 95 | CACUCACCAGGCCGUCCAG | 1754 |
| 91 | GACUACUCCAUGACCCCCC | 1508 | 91 | GACUACUCCAUGACCCCCC | 1508 | 113 | GGGGGGUCAUGGAGUAGUC | 1755 |
| 109 | CCGACCUUGAACAUCACGG | 1509 | 109 | CCGACCUUGAACAUCACGG | 1509 | 131 | CCGUGAUGUUCAAGGUCGG | 1756 |
| 127 | GAGGAGUCACACGUCAUCG | 1510 | 127 | GAGGAGUCACACGUCAUCG | 1510 | 149 | CGAUGACGUGUGACUCCUC | 1757 |
| 145 | GACACCGGUGACAGCCUGU | 1511 | 145 | GACACCGGUGACAGCCUGU | 1511 | 167 | ACAGGCUGUCACCGGUGUC | 1758 |
| 163 | UCCAUCUCCUGCAGGGGAC | 1512 | 163 | UCCAUCUCCUGCAGGGGAC | 1512 | 185 | GUCCCCUGCAGGAGAUGGA | 1759 |
| 181 | CAGCACCCCCUCGAGUGGG | 1513 | 181 | CAGCACCCCCUCGAGUGGG | 1513 | 203 | CCCACUCGAGGGGGUGCUG | 1760 |
| 199 | GCUUGGCCAGGAGCUCAGG | 1514 | 199 | GCUUGGCCAGGAGCUCAGG | 1514 | 221 | CCUGAGCUCCUGGCCAAGC | 1761 |
| 217 | GAGGCGCCAGCCACCGGAG | 1515 | 217 | GAGGCGCCAGCCACCGGAG | 1515 | 239 | CUCCGGUGGCUGGCGCCUC | 1762 |
| 235 | GACAAGGACAGCGAGGACA | 1516 | 235 | GACAAGGACAGCGAGGACA | 1516 | 257 | UGUCCUCGCUGUCCUUGUC | 1763 |
| 253 | ACGGGGGUGGUGCGAGACU | 1517 | 253 | ACGGGGGUGGUGCGAGACU | 1517 | 275 | AGUCUCGCACCACCCCCGU | 1764 |
| 271 | UGCGAGGGCACAGACGCCA | 1518 | 271 | UGCGAGGGCACAGACGCCA | 1518 | 293 | UGGCGUCUGUGCCCUCGCA | 1765 |
| 289 | AGGCCCUACUGCAAGGUGU | 1519 | 289 | AGGCCCUACUGCAAGGUGU | 1519 | 311 | ACACCUUGCAGUAGGGCCU | 1766 |
| 307 | UUGCUGCUGCACGAGGUAC | 1520 | 307 | UUGCUGCUGCACGAGGUAC | 1520 | 329 | GUACCUCGUGCAGCAGCAA | 1767 |
| 325 | CAUGCCAACGACACAGGCA | 1521 | 325 | CAUGCCAACGACACAGGCA | 1521 | 347 | UGCCUGUGUCGUUGGCAUG | 1768 |
| 343 | AGCUACGUCUGCUACUACA | 1522 | 343 | AGCUACGUCUGCUACUACA | 1522 | 365 | UGUAGUAGCAGACGUAGCU | 1769 |
| 361 | AAGUACAUCAAGGCACGCA | 1523 | 361 | AAGUACAUCAAGGCACGCA | 1523 | 383 | UGCGUGCCUUGAUGUACUU | 1770 |
| 379 | AUCGAGGGCACCACGGCCG | 1524 | 379 | AUCGAGGGCACCACGGCCG | 1524 | 401 | CGGCCGUGGUGCCCUCGAU | 1771 |
| 397 | GCCAGCUCCUACGUGUUCG | 1525 | 397 | GCCAGCUCCUACGUGUUCG | 1525 | 419 | CGAACACGUAGGAGCUGGC | 1772 |
| 415 | GUGAGAGACUUUGAGCAGC | 1526 | 415 | GUGAGAGACUUUGAGCAGC | 1526 | 437 | GCUGCUCAAAGUCUCUCAC | 1773 |
| 433 | CCAUUCAUCAACAAGCCUG | 1527 | 433 | CCAUUCAUCAACAAGCCUG | 1527 | 455 | CAGGCUUGUUGAUGAAUGG | 1774 |
| 451 | GACACGCUCUUGGUCAACA | 1528 | 451 | GACACGCUCUUGGUCAACA | 1528 | 473 | UGUUGACCAAGAGCGUGUC | 1775 |
| 469 | AGGAAGGACGCCAUGUGGG | 1529 | 469 | AGGAAGGACGCCAUGUGGG | 1529 | 491 | CCCACAUGGCGUCCUUCCU | 1776 |
| 487 | GUGCCCUGUCUGGUGUCCA | 1530 | 487 | GUGCCCUGUCUGGUGUCCA | 1530 | 509 | UGGACACCAGACAGGGCAC | 1777 |
| 505 | AUCCCCGGCCUCAAUGUCA | 1531 | 505 | AUCCCCGGCCUCAAUGUCA | 1531 | 527 | UGACAUUGAGGCCGGGGAU | 1778 |
| 523 | ACGCUGCGCUCGCAAAGCU | 1532 | 523 | ACGCUGCGCUCGCAAAGCU | 1532 | 545 | AGCUUUGCGAGCGCAGCGU | 1779 |
| 541 | UCGGUGCUGUGGCCAGACG | 1533 | 541 | UCGGUGCUGUGGCCAGACG | 1533 | 563 | CGUCUGGCCACAGCACCGA | 1780 |
| 559 | GGGCAGGAGGUGGUGUGGG | 1534 | 559 | GGGCAGGAGGUGGUGUGGG | 1534 | 581 | CCCACACCACCUCCUGCCC | 1781 |
| 577 | GAUGACCGGCGGGGCAUGC | 1535 | 577 | GAUGACCGGCGGGGCAUGC | 1535 | 599 | GCAUGCCCCGCCGGUCAUC | 1782 |
| 595 | CUCGUGUCCACGCCACUGC | 1536 | 595 | CUCGUGUCCACGCCACUGC | 1536 | 617 | GCAGUGGCGUGGACACGAG | 1783 |
| 613 | CUGCACGAUGCCCUGUACC | 1537 | 613 | CUGCACGAUGCCCUGUACC | 1537 | 635 | GGUACAGGGCAUCGUGCAG | 1784 |
| 631 | CUGCAGUGCGAGACCACCU | 1538 | 631 | CUGCAGUGCGAGACCACCU | 1538 | 653 | AGGUGGUCUCGCACUGCAG | 1785 |
| 649 | UGGGGAGACCAGGACUUCC | 1539 | 649 | UGGGGAGACCAGGACUUCC | 1539 | 671 | GGAAGUCCUGGUCUCCCCA | 1786 |
| 667 | CUUUCCAACCCCUUCCUGG | 1540 | 667 | CUUUCCAACCCCUUCCUGG | 1540 | 689 | CCAGGAAGGGGUUGGAAAG | 1787 |
| 685 | GUGCACAUCACAGGCAACG | 1541 | 685 | GUGCACAUCACAGGCAACG | 1541 | 707 | CGUUGCCUGUGAUGUGCAC | 1788 |
| 703 | GAGCUCUAUGACAUCCAGC | 1542 | 703 | GAGCUCUAUGACAUCCAGC | 1542 | 725 | GCUGGAUGUCAUAGAGCUC | 1789 |
| 721 | CUGUUGCCCAGGAAGUCGC | 1543 | 721 | CUGUUGCCCAGGAAGUCGC | 1543 | 743 | GCGACUUCCUGGGCAACAG | 1790 |
| 739 | CUGGAGCUGCUGGUAGGGG | 1544 | 739 | CUGGAGCUGCUGGUAGGGG | 1544 | 761 | CCCCUACCAGCAGCUCCAG | 1791 |
| 757 | GAGAAGCUGGUCCUCAACU | 1545 | 757 | GAGAAGCUGGUCCUCAACU | 1545 | 779 | AGUUGAGGACCAGCUUCUC | 1792 |
| 775 | UGCACCGUGUGGGCUGAGU | 1546 | 775 | UGCACCGUGUGGGCUGAGU | 1546 | 797 | ACUCAGCCCACACGGUGCA | 1793 |
| 793 | UUUAACUCAGGUGUCACCU | 1547 | 793 | UUUAACUCAGGUGUCACCU | 1547 | 815 | AGGUGACACCUGAGUUAAA | 1794 |
| 811 | UUUGACUGGGACUACCCAG | 1548 | 811 | UUUGACUGGGACUACCCAG | 1548 | 833 | CUGGGUAGUCCCAGUCAAA | 1795 |
| 829 | GGGAAGCAGGCAGAGCGGG | 1549 | 829 | GGGAAGCAGGCAGAGCGGG | 1549 | 851 | CCCGCUCUGCCUGCUUCCC | 1796 |
| 847 | GGUAAGUGGGUGCCCGAGC | 1550 | 847 | GGUAAGUGGGUGCCCGAGC | 1550 | 869 | GCUCGGGCACCCACUUACC | 1797 |
| 865 | CGACGCUCCCAACAGACCC | 1551 | 865 | CGACGCUCCCAACAGACCC | 1551 | 887 | GGGUCUGUUGGGAGCGUCG | 1798 |
| 883 | CACACAGAACUCUCCAGCA | 1552 | 883 | CACACAGAACUCUCCAGCA | 1552 | 905 | UGCUGGAGAGUUCUGUGUG | 1799 |
| 901 | AUCCUGACCAUCCACAACG | 1553 | 901 | AUCCUGACCAUCCACAACG | 1553 | 923 | CGUUGUGGAUGGUCAGGAU | 1800 |
| 919 | GUCAGCCAGCACGACCUGG | 1554 | 919 | GUCAGCCAGCACGACCUGG | 1554 | 941 | CCAGGUCGUGCUGGCUGAC | 1801 |
| 937 | GGCUCGUAUGUGUGCAAGG | 1555 | 937 | GGCUCGUAUGUGUGCAAGG | 1555 | 959 | CCUUGCACACAUACGAGCC | 1802 |
| 955 | GCCAACAACGGCAUCCAGC | 1556 | 955 | GCCAACAACGGCAUCCAGC | 1556 | 977 | GCUGGAUGCCGUUGUUGGC | 1803 |
| 973 | CGAUUUCGGGAGAGCACCG | 1557 | 973 | CGAUUUCGGGAGAGCACCG | 1557 | 995 | CGGUGCUCUCCCGAAAUCG | 1804 |
| 991 | GAGGUCAUUGUGCAUGAAA | 1558 | 991 | GAGGUCAUUGUGCAUGAAA | 1558 | 1013 | UUUCAUGCACAAUGACCUC | 1805 |
| 1009 | AAUCCCUUCAUCAGCGUCG | 1559 | 1009 | AAUCCCUUCAUCAGCGUCG | 1559 | 1031 | CGACGCUGAUGAAGGGAUU | 1806 |
| 1027 | GAGUGGCUCAAAGGACCCA | 1560 | 1027 | GAGUGGCUCAAAGGACCCA | 1560 | 1049 | UGGGUCCUUUGAGCCACUC | 1807 |
| 1045 | AUCCUGGAGGCCACGGCAG | 1561 | 1045 | AUCCUGGAGGCCACGGCAG | 1561 | 1067 | CUGCCGUGGCCUCCAGGAU | 1808 |
| 1063 | GGAGACGAGCUGGUGAAGC | 1562 | 1063 | GGAGACGAGCUGGUGAAGC | 1562 | 1085 | GCUUCACCAGCUCGUCUCC | 1809 |
| 1081 | CUGCCCGUGAAGCUGGCAG | 1563 | 1081 | CUGCCCGUGAAGCUGGCAG | 1563 | 1103 | CUGCCAGCUUCACGGGCAG | 1810 |
| 1099 | GCGUACCCCCCGCCCGAGU | 1564 | 1099 | GCGUACCCCCCGCCCGAGU | 1564 | 1121 | ACUCGGGCGGGGGGUACGC | 1811 |
| 1117 | UUCCAGUGGUACAAGGAUG | 1565 | 1117 | UUCCAGUGGUACAAGGAUG | 1565 | 1139 | CAUCCUUGUACCACUGGAA | 1812 |
| 1135 | GGAAAGGCACUGUCCGGGC | 1566 | 1135 | GGAAAGGCACUGUCCGGGC | 1566 | 1157 | GCCCGGACAGUGCCUUUCC | 1813 |
| 1153 | CGCCACAGUCCACAUGCCC | 1567 | 1153 | CGCCACAGUCCACAUGCCC | 1567 | 1175 | GGGCAUGUGGACUGUGGCG | 1814 |
| 1171 | CUGGUGCUCAAGGAGGUGA | 1568 | 1171 | CUGGUGCUCAAGGAGGUGA | 1568 | 1193 | UCACCUCCUUGAGCACCAG | 1815 |
| 1189 | ACAGAGGCCAGCACAGGCA | 1569 | 1189 | ACAGAGGCCAGCACAGGCA | 1569 | 1211 | UGCCUGUGCUGGCCUCUGU | 1816 |
| 1207 | ACCUACACCCUCGCCCUGU | 1570 | 1207 | ACCUACACCCUCGCCCUGU | 1570 | 1229 | ACAGGGCGAGGGUGUAGGU | 1817 |
| 1225 | UGGAACUCCGCUGCUGGCC | 1571 | 1225 | UGGAACUCCGCUGCUGGCC | 1571 | 1247 | GGCCAGCAGCGGAGUUCCA | 1818 |
| 1243 | CUGAGGCGCAACAUCAGCC | 1572 | 1243 | CUGAGGCGCAACAUCAGCC | 1572 | 1265 | GGCUGAUGUUGCGCCUCAG | 1819 |
| 1261 | CUGGAGCUGGUGGUGAAUG | 1573 | 1261 | CUGGAGCUGGUGGUGAAUG | 1573 | 1283 | CAUUCACCACCAGCUCCAG | 1820 |
| 1279 | GUGCCCCCCCAGAUACAUG | 1574 | 1279 | GUGCCCCCCCAGAUACAUG | 1574 | 1301 | CAUGUAUCUGGGGGGGCAC | 1821 |
| 1297 | GAGAAGGAGGCCUCCUCCC | 1575 | 1297 | GAGAAGGAGGCCUCCUCCC | 1575 | 1319 | GGGAGGAGGCCUCCUUCUC | 1822 |
| 1315 | CCCAGCAUCUACUCGCGUC | 1576 | 1315 | CCCAGCAUCUACUCGCGUC | 1576 | 1337 | GACGCGAGUAGAUGCUGGG | 1823 |
| 1333 | CACAGCCGCCAGGCCCUCA | 1577 | 1333 | CACAGCCGCCAGGCCCUCA | 1577 | 1355 | UGAGGGCCUGGCGGCUGUG | 1824 |
| 1351 | ACCUGCACGGCCUACGGGG | 1578 | 1351 | ACCUGCACGGCCUACGGGG | 1578 | 1373 | CCCCGUAGGCCGUGCAGGU | 1825 |
| 1369 | GUGCCCCUGCCUCUCAGCA | 1579 | 1369 | GUGCCCCUGCCUCUCAGCA | 1579 | 1391 | UGCUGAGAGGCAGGGGCAC | 1826 |
| 1387 | AUCCAGUGGCACUGGCGGC | 1580 | 1387 | AUCCAGUGGCACUGGCGGC | 1580 | 1409 | GCCGCCAGUGCCACUGGAU | 1827 |
| 1405 | CCCUGGACACCCUGCAAGA | 1581 | 1405 | CCCUGGACACCCUGCAAGA | 1581 | 1427 | UCUUGCAGGGUGUCCAGGG | 1828 |
| 1423 | AUGUUUGCCCAGCGUAGUC | 1582 | 1423 | AUGUUUGCCCAGCGUAGUC | 1582 | 1445 | GACUACGCUGGGCAAACAU | 1829 |
| 1441 | CUCCGGCGGCGGCAGCAGC | 1583 | 1441 | CUCCGGCGGCGGCAGCAGC | 1583 | 1463 | GCUGCUGCCGCCGCCGGAG | 1830 |
| 1459 | CAAGACCUCAUGCCACAGU | 1584 | 1459 | CAAGACCUCAUGCCACAGU | 1584 | 1481 | ACUGUGGCAUGAGGUCUUG | 1831 |
| 1477 | UGCCGUGACUGGAGGGCGG | 1585 | 1477 | UGCCGUGACUGGAGGGCGG | 1585 | 1499 | CCGCCCUCCAGUCACGGCA | 1832 |
| 1495 | GUGACCACGCAGGAUGCCG | 1586 | 1495 | GUGACCACGCAGGAUGCCG | 1586 | 1517 | CGGCAUCCUGCGUGGUCAC | 1833 |
| 1513 | GUGAACCCCAUCGAGAGCC | 1587 | 1513 | GUGAACCCCAUCGAGAGCC | 1587 | 1535 | GGCUCUCGAUGGGGUUCAC | 1834 |
| 1531 | CUGGACACCUGGACCGAGU | 1588 | 1531 | CUGGACACCUGGACCGAGU | 1588 | 1553 | ACUCGGUCCAGGUGUCCAG | 1835 |
| 1549 | UUUGUGGAGGGAAAGAAUA | 1589 | 1549 | UUUGUGGAGGGAAAGAAUA | 1589 | 1571 | UAUUCUUUCCCUCCACAAA | 1836 |
| 1567 | AAGACUGUGAGCAAGCUGG | 1590 | 1567 | AAGACUGUGAGCAAGCUGG | 1590 | 1589 | CCAGCUUGCUCACAGUCUU | 1837 |
| 1585 | GUGAUCCAGAAUGCCAACG | 1591 | 1585 | GUGAUCCAGAAUGCCAACG | 1591 | 1607 | CGUUGGCAUUCUGGAUCAC | 1838 |
| 1603 | GUGUCUGCCAUGUACAAGU | 1592 | 1603 | GUGUCUGCCAUGUACAAGU | 1592 | 1625 | ACUUGUACAUGGCAGACAC | 1839 |
| 1621 | UGUGUGGUCUCCAACAAGG | 1593 | 1621 | UGUGUGGUCUCCAACAAGG | 1593 | 1643 | CCUUGUUGGAGACCACACA | 1840 |
| 1639 | GUGGGCCAGGAUGAGCGGC | 1594 | 1639 | GUGGGCCAGGAUGAGCGGC | 1594 | 1661 | GCCGCUCAUCCUGGCCCAC | 1841 |
| 1657 | CUCAUCUACUUCUAUGUGA | 1595 | 1657 | CUCAUCUACUUCUAUGUGA | 1595 | 1679 | UCACAUAGAAGUAGAUGAG | 1842 |
| 1675 | ACCACCAUCCCCGACGGCU | 1596 | 1675 | ACCACCAUCCCCGACGGCU | 1596 | 1697 | AGCCGUCGGGGAUGGUGGU | 1843 |
| 1693 | UUCACCAUCGAAUCCAAGC | 1597 | 1693 | UUCACCAUCGAAUCCAAGC | 1597 | 1715 | GCUUGGAUUCGAUGGUGAA | 1844 |
| 1711 | CCAUCCGAGGAGCUACUAG | 1598 | 1711 | CCAUCCGAGGAGCUACUAG | 1598 | 1733 | CUAGUAGCUCCUCGGAUGG | 1845 |
| 1729 | GAGGGCCAGCCGGUGCUCC | 1599 | 1729 | GAGGGCCAGCCGGUGCUCC | 1599 | 1751 | GGAGCACCGGCUGGCCCUC | 1846 |
| 1747 | CUGAGCUGCCAAGCCGACA | 1600 | 1747 | CUGAGCUGCCAAGCCGACA | 1600 | 1769 | UGUCGGCUUGGCAGCUCAG | 1847 |
| 1765 | AGCUACAAGUACGAGCAUC | 1601 | 1765 | AGCUACAAGUACGAGCAUC | 1601 | 1787 | GAUGCUCGUACUUGUAGCU | 1848 |
| 1783 | CUGCGCUGGUACCGCCUCA | 1602 | 1783 | CUGCGCUGGUACCGCCUCA | 1602 | 1805 | UGAGGCGGUACCAGCGCAG | 1849 |
| 1801 | AACCUGUCCACGCUGCACG | 1603 | 1801 | AACCUGUCCACGCUGCACG | 1603 | 1823 | CGUGCAGCGUGGACAGGUU | 1850 |
| 1819 | GAUGCGCACGGGAACCCGC | 1604 | 1819 | GAUGCGCACGGGAACCCGC | 1604 | 1841 | GCGGGUUCCCGUGCGCAUC | 1851 |
| 1837 | CUUCUGCUCGACUGCAAGA | 1605 | 1837 | CUUCUGCUCGACUGCAAGA | 1605 | 1859 | UCUUGCAGUCGAGCAGAAG | 1852 |
| 1855 | AACGUGCAUCUGUUCGCCA | 1606 | 1855 | AACGUGCAUCUGUUCGCCA | 1606 | 1877 | UGGCGAACAGAUGCACGUU | 1853 |
| 1873 | ACCCCUCUGGCCGCCAGCC | 1607 | 1873 | ACCCCUCUGGCCGCCAGCC | 1607 | 1895 | GGCUGGCGGCCAGAGGGGU | 1854 |
| 1891 | CUGGAGGAGGUGGCACCUG | 1608 | 1891 | CUGGAGGAGGUGGCACCUG | 1608 | 1913 | CAGGUGCCACCUCCUCCAG | 1855 |
| 1909 | GGGGCGCGCCACGCCACGC | 1609 | 1909 | GGGGCGCGCCACGCCACGC | 1609 | 1931 | GCGUGGCGUGGCGCGCCCC | 1856 |
| 1927 | CUCAGCCUGAGUAUCCCCC | 1610 | 1927 | CUCAGCCUGAGUAUCCCCC | 1610 | 1949 | GGGGGAUACUCAGGCUGAG | 1857 |
| 1945 | CGCGUCGCGCCCGAGCACG | 1611 | 1945 | CGCGUCGCGCCCGAGCACG | 1611 | 1967 | CGUGCUCGGGCGCGACGCG | 1858 |
| 1963 | GAGGGCCACUAUGUGUGCG | 1612 | 1963 | GAGGGCCACUAUGUGUGCG | 1612 | 1985 | CGCACACAUAGUGGCCCUC | 1859 |
| 1981 | GAAGUGCAAGACCGGCGCA | 1613 | 1981 | GAAGUGCAAGACCGGCGCA | 1613 | 2003 | UGCGCCGGUCUUGCACUUC | 1860 |
| 1999 | AGCCAUGACAAGCACUGCC | 1614 | 1999 | AGCCAUGACAAGCACUGCC | 1614 | 2021 | GGCAGUGCUUGUCAUGGCU | 1861 |
| 2017 | CACAAGAAGUACCUGUCGG | 1615 | 2017 | CACAAGAAGUACCUGUCGG | 1615 | 2039 | CCGACAGGUACUUCUUGUG | 1862 |
| 2035 | GUGCAGGCCCUGGAAGCCC | 1616 | 2035 | GUGCAGGCCCUGGAAGCCC | 1616 | 2057 | GGGCUUCCAGGGCCUGCAC | 1863 |
| 2053 | CCUCGGCUCACGCAGAACU | 1617 | 2053 | CCUCGGCUCACGCAGAACU | 1617 | 2075 | AGUUCUGCGUGAGCCGAGG | 1864 |
| 2071 | UUGACCGACCUCCUGGUGA | 1618 | 2071 | UUGACCGACCUCCUGGUGA | 1618 | 2093 | UCACCAGGAGGUCGGUCAA | 1865 |
| 2089 | AACGUGAGCGACUCGCUGG | 1619 | 2089 | AACGUGAGCGACUCGCUGG | 1619 | 2111 | CCAGCGAGUCGCUCACGUU | 1866 |
| 2107 | GAGAUGCAGUGCUUGGUGG | 1620 | 2107 | GAGAUGCAGUGCUUGGUGG | 1620 | 2129 | CCACCAAGCACUGCAUCUC | 1867 |
| 2125 | GCCGGAGCGCACGCGCCCA | 1621 | 2125 | GCCGGAGCGCACGCGCCCA | 1621 | 2147 | UGGGCGCGUGCGCUCCGGC | 1868 |
| 2143 | AGCAUCGUGUGGUACAAAG | 1622 | 2143 | AGCAUCGUGUGGUACAAAG | 1622 | 2165 | CUUUGUACCACACGAUGCU | 1869 |
| 2161 | GACGAGAGGCUGCUGGAGG | 1623 | 2161 | GACGAGAGGCUGCUGGAGG | 1623 | 2183 | CCUCCAGCAGCCUCUCGUC | 1870 |
| 2179 | GAAAAGUCUGGAGUCGACU | 1624 | 2179 | GAAAAGUCUGGAGUCGACU | 1624 | 2201 | AGUCGACUCCAGACUUUUC | 1871 |
| 2197 | UUGGCGGACUCCAACCAGA | 1625 | 2197 | UUGGCGGACUCCAACCAGA | 1625 | 2219 | UCUGGUUGGAGUCCGCCAA | 1872 |
| 2215 | AAGCUGAGCAUCCAGCGCG | 1626 | 2215 | AAGCUGAGCAUCCAGCGCG | 1626 | 2237 | CGCGCUGGAUGCUCAGCUU | 1873 |
| 2233 | GUGCGCGAGGAGGAUGCGG | 1627 | 2233 | GUGCGCGAGGAGGAUGCGG | 1627 | 2255 | CCGCAUCCUCCUCGCGCAC | 1874 |
| 2251 | GGACCGUAUCUGUGCAGCG | 1628 | 2251 | GGACCGUAUCUGUGCAGCG | 1628 | 2273 | CGCUGCACAGAUACGGUCC | 1875 |
| 2269 | GUGUGCAGACCCAAGGGCU | 1629 | 2269 | GUGUGCAGACCCAAGGGCU | 1629 | 2291 | AGCCCUUGGGUCUGCACAC | 1876 |
| 2287 | UGCGUCAACUCCUCCGCCA | 1630 | 2287 | UGCGUCAACUCCUCCGCCA | 1630 | 2309 | UGGCGGAGGAGUUGACGCA | 1877 |
| 2305 | AGCGUGGCCGUGGAAGGCU | 1631 | 2305 | AGCGUGGCCGUGGAAGGCU | 1631 | 2327 | AGCCUUCCACGGCCACGCU | 1878 |
| 2323 | UCCGAGGAUAAGGGCAGCA | 1632 | 2323 | UCCGAGGAUAAGGGCAGCA | 1632 | 2345 | UGCUGCCCUUAUCCUCGGA | 1879 |
| 2341 | AUGGAGAUCGUGAUCCUUG | 1633 | 2341 | AUGGAGAUCGUGAUCCUUG | 1633 | 2363 | CAAGGAUCACGAUCUCCAU | 1880 |
| 2359 | GUCGGUACCGGCGUCAUCG | 1634 | 2359 | GUCGGUACCGGCGUCAUCG | 1634 | 2381 | CGAUGACGCCGGUACCGAC | 1881 |
| 2377 | GCUGUCUUCUUCUGGGUCC | 1635 | 2377 | GCUGUCUUCUUCUGGGUCC | 1635 | 2399 | GGACCCAGAAGAAGACAGC | 1882 |
| 2395 | CUCCUCCUCCUCAUCUUCU | 1636 | 2395 | CUCCUCCUCCUCAUCUUCU | 1636 | 2417 | AGAAGAUGAGGAGGAGGAG | 1883 |
| 2413 | UGUAACAUGAGGAGGCCGG | 1637 | 2413 | UGUAACAUGAGGAGGCCGG | 1637 | 2435 | CCGGCCUCCUCAUGUUACA | 1884 |
| 2431 | GCCCACGCAGACAUCAAGA | 1638 | 2431 | GCCCACGCAGACAUCAAGA | 1638 | 2453 | UCUUGAUGUCUGCGUGGGC | 1885 |
| 2449 | ACGGGCUACCUGUCCAUCA | 1639 | 2449 | ACGGGCUACCUGUCCAUCA | 1639 | 2471 | UGAUGGACAGGUAGCCCGU | 1886 |
| 2467 | AUCAUGGACCCCGGGGAGG | 1640 | 2467 | AUCAUGGACCCCGGGGAGG | 1640 | 2489 | CCUCCCCGGGGUCCAUGAU | 1887 |
| 2485 | GUGCCUCUGGAGGAGCAAU | 1641 | 2485 | GUGCCUCUGGAGGAGCAAU | 1641 | 2507 | AUUGCUCCUCCAGAGGCAC | 1888 |
| 2503 | UGCGAAUACCUGUCCUACG | 1642 | 2503 | UGCGAAUACCUGUCCUACG | 1642 | 2525 | CGUAGGACAGGUAUUCGCA | 1889 |
| 2521 | GAUGCCAGCCAGUGGGAAU | 1643 | 2521 | GAUGCCAGCCAGUGGGAAU | 1643 | 2543 | AUUCCCACUGGCUGGCAUC | 1890 |
| 2539 | UUCCCCCGAGAGCGGCUGC | 1644 | 2539 | UUCCCCCGAGAGCGGCUGC | 1644 | 2561 | GCAGCCGCUCUCGGGGGAA | 1891 |
| 2557 | CACCUGGGGAGAGUGCUCG | 1645 | 2557 | CACCUGGGGAGAGUGCUCG | 1645 | 2579 | CGAGCACUCUCCCCAGGUG | 1892 |
| 2575 | GGCUACGGCGCCUUCGGGA | 1646 | 2575 | GGCUACGGCGCCUUCGGGA | 1646 | 2597 | UCCCGAAGGCGCCGUAGCC | 1893 |
| 2593 | AAGGUGGUGGAAGCCUCCG | 1647 | 2593 | AAGGUGGUGGAAGCCUCCG | 1647 | 2615 | CGGAGGCUUCCACCACCUU | 1894 |
| 2611 | GCUUUCGGCAUCCACAAGG | 1648 | 2611 | GCUUUCGGCAUCCACAAGG | 1648 | 2633 | CCUUGUGGAUGCCGAAAGC | 1895 |
| 2629 | GGCAGCAGCUGUGACACCG | 1649 | 2629 | GGCAGCAGCUGUGACACCG | 1649 | 2651 | CGGUGUCACAGCUGCUGCC | 1896 |
| 2647 | GUGGCCGUGAAAAUGCUGA | 1650 | 2647 | GUGGCCGUGAAAAUGCUGA | 1650 | 2669 | UCAGCAUUUUCACGGCCAC | 1897 |
| 2665 | AAAGAGGGCGCCACGGCCA | 1651 | 2665 | AAAGAGGGCGCCACGGCCA | 1651 | 2687 | UGGCCGUGGCGCCCUCUUU | 1898 |
| 2683 | AGCGAGCAGCGCGCGCUGA | 1652 | 2683 | AGCGAGCAGCGCGCGCUGA | 1652 | 2705 | UCAGCGCGCGCUGCUCGCU | 1899 |
| 2701 | AUGUCGGAGCUCAAGAUCC | 1653 | 2701 | AUGUCGGAGCUCAAGAUCC | 1653 | 2723 | GGAUCUUGAGCUCCGACAU | 1900 |
| 2719 | CUCAUUCACAUCGGCAACC | 1654 | 2719 | CUCAUUCACAUCGGCAACC | 1654 | 2741 | GGUUGCCGAUGUGAAUGAG | 1901 |
| 2737 | CACCUCAACGUGGUCAACC | 1655 | 2737 | CACCUCAACGUGGUCAACC | 1655 | 2759 | GGUUGACCACGUUGAGGUG | 1902 |
| 2755 | CUCCUCGGGGCGUGCACCA | 1656 | 2755 | CUCCUCGGGGCGUGCACCA | 1656 | 2777 | UGGUGCACGCCCCGAGGAG | 1903 |
| 2773 | AAGCCGCAGGGCCCCCUCA | 1657 | 2773 | AAGCCGCAGGGCCCCCUCA | 1657 | 2795 | UGAGGGGGCCCUGCGGCUU | 1904 |
| 2791 | AUGGUGAUCGUGGAGUUCU | 1658 | 2791 | AUGGUGAUCGUGGAGUUCU | 1658 | 2813 | AGAACUCCACGAUCACCAU | 1905 |
| 2809 | UGCAAGUACGGCAACCUCU | 1659 | 2809 | UGCAAGUACGGCAACCUCU | 1659 | 2831 | AGAGGUUGCCGUACUUGCA | 1906 |
| 2827 | UCCAACUUCCUGCGCGCCA | 1660 | 2827 | UCCAACUUCCUGCGCGCCA | 1660 | 2849 | UGGCGCGCAGGAAGUUGGA | 1907 |
| 2845 | AAGCGGGACGCCUUCAGCC | 1661 | 2845 | AAGCGGGACGCCUUCAGCC | 1661 | 2867 | GGCUGAAGGCGUCCCGCUU | 1908 |
| 2863 | CCCUGCGCGGAGAAGUCUC | 1662 | 2863 | CCCUGCGCGGAGAAGUCUC | 1662 | 2885 | GAGACUUCUCCGCGCAGGG | 1909 |
| 2881 | CCCGAGCAGCGCGGACGCU | 1663 | 2881 | CCCGAGCAGCGCGGACGCU | 1663 | 2903 | AGCGUCCGCGCUGCUCGGG | 1910 |
| 2899 | UUCCGCGCCAUGGUGGAGC | 1664 | 2899 | UUCCGCGCCAUGGUGGAGC | 1664 | 2921 | GCUCCACCAUGGCGCGGAA | 1911 |
| 2917 | CUCGCCAGGCUGGAUCGGA | 1665 | 2917 | CUCGCCAGGCUGGAUCGGA | 1665 | 2939 | UCCGAUCCAGCCUGGCGAG | 1912 |
| 2935 | AGGCGGCCGGGGAGCAGCG | 1666 | 2935 | AGGCGGCCGGGGAGCAGCG | 1666 | 2957 | CGCUGCUCCCCGGCCGCCU | 1913 |
| 2953 | GACAGGGUCCUCUUCGCGC | 1667 | 2953 | GACAGGGUCCUCUUCGCGC | 1667 | 2975 | GCGCGAAGAGGACCCUGUC | 1914 |
| 2971 | CGGUUCUCGAAGACCGAGG | 1668 | 2971 | CGGUUCUCGAAGACCGAGG | 1668 | 2993 | CCUCGGUCUUCGAGAACCG | 1915 |
| 2989 | GGCGGAGCGAGGCGGGCUU | 1669 | 2989 | GGCGGAGCGAGGCGGGCUU | 1669 | 3011 | AAGCCCGCCUCGCUCCGCC | 1916 |
| 3007 | UCUCCAGACCAAGAAGCUG | 1670 | 3007 | UCUCCAGACCAAGAAGCUG | 1670 | 3029 | CAGCUUCUUGGUCUGGAGA | 1917 |
| 3025 | GAGGACCUGUGGCUGAGCC | 1671 | 3025 | GAGGACCUGUGGCUGAGCC | 1671 | 3047 | GGCUCAGCCACAGGUCCUC | 1918 |
| 3043 | CCGCUGACCAUGGAAGAUC | 1672 | 3043 | CCGCUGACCAUGGAAGAUC | 1672 | 3065 | GAUCUUCCAUGGUCAGCGG | 1919 |
| 3061 | CUUGUCUGCUACAGCUUCC | 1673 | 3061 | CUUGUCUGCUACAGCUUCC | 1673 | 3083 | GGAAGCUGUAGCAGACAAG | 1920 |
| 3079 | CAGGUGGCCAGAGGGAUGG | 1674 | 3079 | CAGGUGGCCAGAGGGAUGG | 1674 | 3101 | CCAUCCCUCUGGCCACCUG | 1921 |
| 3097 | GAGUUCCUGGCUUCCCGAA | 1675 | 3097 | GAGUUCCUGGCUUCCCGAA | 1675 | 3119 | UUCGGGAAGCCAGGAACUC | 1922 |
| 3115 | AAGUGCAUCCACAGAGACC | 1676 | 3115 | AAGUGCAUCCACAGAGACC | 1676 | 3137 | GGUCUCUGUGGAUGCACUU | 1923 |
| 3133 | CUGGCUGCUCGGAACAUUC | 1677 | 3133 | CUGGCUGCUCGGAACAUUC | 1677 | 3155 | GAAUGUUCCGAGCAGCCAG | 1924 |
| 3151 | CUGCUGUCGGAAAGCGACG | 1678 | 3151 | CUGCUGUCGGAAAGCGACG | 1678 | 3173 | CGUCGCUUUCCGACAGCAG | 1925 |
| 3169 | GUGGUGAAGAUCUGUGACU | 1679 | 3169 | GUGGUGAAGAUCUGUGACU | 1679 | 3191 | AGUCACAGAUCUUCACCAC | 1926 |
| 3187 | UUUGGCCUUGCCCGGGACA | 1680 | 3187 | UUUGGCCUUGCCCGGGACA | 1680 | 3209 | UGUCCCGGGCAAGGCCAAA | 1927 |
| 3205 | AUCUACAAAGACCCCGACU | 1681 | 3205 | AUCUACAAAGACCCCGACU | 1681 | 3227 | AGUCGGGGUCUUUGUAGAU | 1928 |
| 3223 | UACGUCCGCAAGGGCAGUG | 1682 | 3223 | UACGUCCGCAAGGGCAGUG | 1682 | 3245 | CACUGCCCUUGCGGACGUA | 1929 |
| 3241 | GCCCGGCUGCCCCUGAAGU | 1683 | 3241 | GCCCGGCUGCCCCUGAAGU | 1683 | 3263 | ACUUCAGGGGCAGCCGGGC | 1930 |
| 3259 | UGGAUGGCCCCUGAAAGCA | 1684 | 3259 | UGGAUGGCCCCUGAAAGCA | 1684 | 3281 | UGCUUUCAGGGGCCAUCCA | 1931 |
| 3277 | AUCUUCGACAAGGUGUACA | 1685 | 3277 | AUCUUCGACAAGGUGUACA | 1685 | 3299 | UGUACACCUUGUCGAAGAU | 1932 |
| 3295 | ACCACGCAGAGUGACGUGU | 1686 | 3295 | ACCACGCAGAGUGACGUGU | 1686 | 3317 | ACACGUCACUCUGCGUGGU | 1933 |
| 3313 | UGGUCCUUUGGGGUGCUUC | 1687 | 3313 | UGGUCCUUUGGGGUGCUUC | 1687 | 3335 | GAAGCACCCCAAAGGACCA | 1934 |
| 3331 | CUCUGGGAGAUCUUCUCUC | 1688 | 3331 | CUCUGGGAGAUCUUCUCUC | 1688 | 3353 | GAGAGAAGAUCUCCCAGAG | 1935 |
| 3349 | CUGGGGGCCUCCCCGUACC | 1689 | 3349 | CUGGGGGCCUCCCCGUACC | 1689 | 3371 | GGUACGGGGAGGCCCCCAG | 1936 |
| 3367 | CCUGGGGUGCAGAUCAAUG | 1690 | 3367 | CCUGGGGUGCAGAUCAAUG | 1690 | 3389 | CAUUGAUCUGCACCCCAGG | 1937 |
| 3385 | GAGGAGUUCUGCCAGCGCG | 1691 | 3385 | GAGGAGUUCUGCCAGCGCG | 1691 | 3407 | CGCGCUGGCAGAACUCCUC | 1938 |
| 3403 | GUGAGAGACGGCACAAGGA | 1692 | 3403 | GUGAGAGACGGCACAAGGA | 1692 | 3425 | UCCUUGUGCCGUCUCUCAC | 1939 |
| 3421 | AUGAGGGCCCCGGAGCUGG | 1693 | 3421 | AUGAGGGCCCCGGAGCUGG | 1693 | 3443 | CCAGCUCCGGGGCCCUCAU | 1940 |
| 3439 | GCCACUCCCGCCAUACGCC | 1694 | 3439 | GCCACUCCCGCCAUACGCC | 1694 | 3461 | GGCGUAUGGCGGGAGUGGC | 1941 |
| 3457 | CACAUCAUGCUGAACUGCU | 1695 | 3457 | CACAUCAUGCUGAACUGCU | 1695 | 3479 | AGCAGUUCAGCAUGAUGUG | 1942 |
| 3475 | UGGUCCGGAGACCCCAAGG | 1696 | 3475 | UGGUCCGGAGACCCCAAGG | 1696 | 3497 | CCUUGGGGUCUCCGGACCA | 1943 |
| 3493 | GCGAGACCUGCAUUCUCGG | 1697 | 3493 | GCGAGACCUGCAUUCUCGG | 1697 | 3515 | CCGAGAAUGCAGGUCUCGC | 1944 |
| 3511 | GACCUGGUGGAGAUCCUGG | 1698 | 3511 | GACCUGGUGGAGAUCCUGG | 1698 | 3533 | CCAGGAUCUCCACCAGGUC | 1945 |
| 3529 | GGGGACCUGCUCCAGGGCA | 1699 | 3529 | GGGGACCUGCUCCAGGGCA | 1699 | 3551 | UGCCCUGGAGCAGGUCCCC | 1946 |
| 3547 | AGGGGCCUGCAAGAGGAAG | 1700 | 3547 | AGGGGCCUGCAAGAGGAAG | 1700 | 3569 | CUUCCUCUUGCAGGCCCCU | 1947 |
| 3565 | GAGGAGGUCUGCAUGGCCC | 1701 | 3565 | GAGGAGGUCUGCAUGGCCC | 1701 | 3587 | GGGCCAUGCAGACCUCCUC | 1948 |
| 3583 | CCGCGCAGCUCUCAGAGCU | 1702 | 3583 | CCGCGCAGCUCUCAGAGCU | 1702 | 3605 | AGCUCUGAGAGCUGCGCGG | 1949 |
| 3601 | UCAGAAGAGGGCAGCUUCU | 1703 | 3601 | UCAGAAGAGGGCAGCUUCU | 1703 | 3623 | AGAAGCUGCCCUCUUCUGA | 1950 |
| 3619 | UCGCAGGUGUCCACCAUGG | 1704 | 3619 | UCGCAGGUGUCCACCAUGG | 1704 | 3641 | CCAUGGUGGACACCUGCGA | 1951 |
| 3637 | GCCCUACACAUCGCCCAGG | 1705 | 3637 | GCCCUACACAUCGCCCAGG | 1705 | 3659 | CCUGGGCGAUGUGUAGGGC | 1952 |
| 3655 | GCUGACGCUGAGGACAGCC | 1706 | 3655 | GCUGACGCUGAGGACAGCC | 1706 | 3677 | GGCUGUCCUCAGCGUCAGC | 1953 |
| 3673 | CCGCCAAGCCUGCAGCGCC | 1707 | 3673 | CCGCCAAGCCUGCAGCGCC | 1707 | 3695 | GGCGCUGCAGGCUUGGCGG | 1954 |
| 3691 | CACAGCCUGGCCGCCAGGU | 1708 | 3691 | CACAGCCUGGCCGCCAGGU | 1708 | 3713 | ACCUGGCGGCCAGGCUGUG | 1955 |
| 3709 | UAUUACAACUGGGUGUCCU | 1709 | 3709 | UAUUACAACUGGGUGUCCU | 1709 | 3731 | AGGACACCCAGUUGUAAUA | 1956 |
| 3727 | UUUCCCGGGUGCCUGGCCA | 1710 | 3727 | UUUCCCGGGUGCCUGGCCA | 1710 | 3749 | UGGCCAGGCACCCGGGAAA | 1957 |
| 3745 | AGAGGGGCUGAGACCCGUG | 1711 | 3745 | AGAGGGGCUGAGACCCGUG | 1711 | 3767 | CACGGGUCUCAGCCCCUCU | 1958 |
| 3763 | GGUUCCUCCAGGAUGAAGA | 1712 | 3763 | GGUUCCUCCAGGAUGAAGA | 1712 | 3785 | UCUUCAUCCUGGAGGAACC | 1959 |
| 3781 | ACAUUUGAGGAAUUCCCCA | 1713 | 3781 | ACAUUUGAGGAAUUCCCCA | 1713 | 3803 | UGGGGAAUUCCUCAAAUGU | 1960 |
| 3799 | AUGACCCCAACGACCUACA | 1714 | 3799 | AUGACCCCAACGACCUACA | 1714 | 3821 | UGUAGGUCGUUGGGGUCAU | 1961 |
| 3817 | AAAGGCUCUGUGGACAACC | 1715 | 3817 | AAAGGCUCUGUGGACAACC | 1715 | 3839 | GGUUGUCCACAGAGCCUUU | 1962 |
| 3835 | CAGACAGACAGUGGGAUGG | 1716 | 3835 | CAGACAGACAGUGGGAUGG | 1716 | 3857 | CCAUCCCACUGUCUGUCUG | 1963 |
| 3853 | GUGCUGGCCUCGGAGGAGU | 1717 | 3853 | GUGCUGGCCUCGGAGGAGU | 1717 | 3875 | ACUCCUCCGAGGCCAGCAC | 1964 |
| 3871 | UUUGAGCAGAUAGAGAGCA | 1718 | 3871 | UUUGAGCAGAUAGAGAGCA | 1718 | 3893 | UGCUCUCUAUCUGCUCAAA | 1965 |
| 3889 | AGGCAUAGACAAGAAAGCG | 1719 | 3889 | AGGCAUAGACAAGAAAGCG | 1719 | 3911 | CGCUUUCUUGUCUAUGCCU | 1966 |
| 3907 | GGCUUCAGGUAGCUGAAGC | 1720 | 3907 | GGCUUCAGGUAGCUGAAGC | 1720 | 3929 | GCUUCAGCUACCUGAAGCC | 1967 |
| 3925 | CAGAGAGAGAGAAGGCAGC | 1721 | 3925 | CAGAGAGAGAGAAGGCAGC | 1721 | 3947 | GCUGCCUUCUCUCUCUCUG | 1968 |
| 3943 | CAUACGUCAGCAUUUUCUU | 1722 | 3943 | CAUACGUCAGCAUUUUCUU | 1722 | 3965 | AAGAAAAUGCUGACGUAUG | 1969 |
| 3961 | UCUCUGCACUUAUAAGAAA | 1723 | 3961 | UCUCUGCACUUAUAAGAAA | 1723 | 3983 | UUUCUUAUAAGUGCAGAGA | 1970 |
| 3979 | AGAUCAAAGACUUUAAGAC | 1724 | 3979 | AGAUCAAAGACUUUAAGAC | 1724 | 4001 | GUCUUAAAGUCUUUGAUCU | 1971 |
| 3997 | CUUUCGCUAUUUCUUCUAC | 1725 | 3997 | CUUUCGCUAUUUCUUCUAC | 1725 | 4019 | GUAGAAGAAAUAGCGAAAG | 1972 |
| 4015 | CUGCUAUCUACUACAAACU | 1726 | 4015 | CUGCUAUCUACUACAAACU | 1726 | 4037 | AGUUUGUAGUAGAUAGCAG | 1973 |
| 4033 | UUCAAAGAGGAACCAGGAG | 1727 | 4033 | UUCAAAGAGGAACCAGGAG | 1727 | 4055 | CUCCUGGUUCCUCUUUGAA | 1974 |
| 4051 | GGACAAGAGGAGCAUGAAA | 1728 | 4051 | GGACAAGAGGAGCAUGAAA | 1728 | 4073 | UUUCAUGCUCCUCUUGUCC | 1975 |
| 4069 | AGUGGACAAGGAGUGUGAC | 1729 | 4069 | AGUGGACAAGGAGUGUGAC | 1729 | 4091 | GUCACACUCCUUGUCCACU | 1976 |
| 4087 | CCACUGAAGCACCACAGGG | 1730 | 4087 | CCACUGAAGCACCACAGGG | 1730 | 4109 | CCCUGUGGUGCUUCAGUGG | 1977 |
| 4105 | GAGGGGUUAGGCCUCCGGA | 1731 | 4105 | GAGGGGUUAGGCCUCCGGA | 1731 | 4127 | UCCGGAGGCCUAACCCCUC | 1978 |
| 4123 | AUGACUGCGGGCAGGCCUG | 1732 | 4123 | AUGACUGCGGGCAGGCCUG | 1732 | 4145 | CAGGCCUGCCCGCAGUCAU | 1979 |
| 4141 | GGAUAAUAUCCAGCCUCCC | 1733 | 4141 | GGAUAAUAUCCAGCCUCCC | 1733 | 4163 | GGGAGGCUGGAUAUUAUCC | 1980 |
| 4159 | CACAAGAAGCUGGUGGAGC | 1734 | 4159 | CACAAGAAGCUGGUGGAGC | 1734 | 4181 | GCUCCACCAGCUUCUUGUG | 1981 |
| 4177 | CAGAGUGUUCCCUGACUCC | 1735 | 4177 | CAGAGUGUUCCCUGACUCC | 1735 | 4199 | GGAGUCAGGGAACACUCUG | 1982 |
| 4195 | CUCCAAGGAAAGGGAGACG | 1736 | 4195 | CUCCAAGGAAAGGGAGACG | 1736 | 4217 | CGUCUCCCUUUCCUUGGAG | 1983 |
| 4213 | GCCCUUUCAUGGUCUGCUG | 1737 | 4213 | GCCCUUUCAUGGUCUGCUG | 1737 | 4235 | CAGCAGACCAUGAAAGGGC | 1984 |
| 4231 | GAGUAACAGGUGCCUUCCC | 1738 | 4231 | GAGUAACAGGUGCCUUCCC | 1738 | 4253 | GGGAAGGCACCUGUUACUC | 1985 |
| 4249 | CAGACACUGGCGUUACUGC | 1739 | 4249 | CAGACACUGGCGUUACUGC | 1739 | 4271 | GCAGUAACGCCAGUGUCUG | 1986 |
| 4267 | CUUGACCAAAGAGCCCUCA | 1740 | 4267 | CUUGACCAAAGAGCCCUCA | 1740 | 4289 | UGAGGGCUCUUUGGUCAAG | 1987 |
| 4285 | AAGCGGCCCUUAUGCCAGC | 1741 | 4285 | AAGCGGCCCUUAUGCCAGC | 1741 | 4307 | GCUGGCAUAAGGGCCGCUU | 1988 |
| 4303 | CGUGACAGAGGGCUCACCU | 1742 | 4303 | CGUGACAGAGGGCUCACCU | 1742 | 4325 | AGGUGAGCCCUCUGUCACG | 1989 |
| 4321 | UCUUGCCUUCUAGGUCACU | 1743 | 4321 | UCUUGCCUUCUAGGUCACU | 1743 | 4343 | AGUGACCUAGAAGGCAAGA | 1990 |
| 4339 | UUCUCACAAUGUCCCUUCA | 1744 | 4339 | UUCUCACAAUGUCCCUUCA | 1744 | 4361 | UGAAGGGACAUUGUGAGAA | 1991 |
| 4357 | AGCACCUGACCCUGUGCCC | 1745 | 4357 | AGCACCUGACCCUGUGCCC | 1745 | 4379 | GGGCACAGGGUCAGGUGCU | 1992 |
| 4375 | CGCCGAUUAUUCCUUGGUA | 1746 | 4375 | CGCCGAUUAUUCCUUGGUA | 1746 | 4397 | UACCAAGGAAUAAUCGGCG | 1993 |
| 4393 | AAUAUGAGUAAUACAUCAA | 1747 | 4393 | AAUAUGAGUAAUACAUCAA | 1747 | 4415 | UUGAUGUAUUACUCAUAUU | 1994 |
| 4411 | AAGAGUAGUAUUAAAAGCU | 1748 | 4411 | AAGAGUAGUAUUAAAAGCU | 1748 | 4433 | AGCUUUUAAUACUACUCUU | 1995 |
| 4429 | UAAUUAAUCAUGUUUAUAA | 1749 | 4429 | UAAUUAAUCAUGUUUAUAA | 1749 | 4451 | UUAUAAACAUGAUUAAUUA | 1996 |
| The 3′-ends of the Upper sequence and the Lower sequence of the siNA construct can include an overhang sequence, for example about 1, 2, 3, or 4 nucleotides in length, preferably 2 nucleotides in length, wherein the overhanging sequence of the lower sequence is optionally complementary to a portion of the target sequence. The overhang can comprise the general structure NN or NsN, where N stands for any nucleotide (e.g., thymidine) and s stands for phosphorothioate or other internucleotide linkage | | | | | | | | |
| # as described herein (e.g. internucleotide linkage having Formula I). The upper sequence is also referred to as the sense strand, whereas the lower sequence is also referred to as the antisense strand. The upper and lower sequences in the Table can further comprise a chemical modification having Formulae I-VII or any combination thereof (see for example chemical modifications as shown in Table V herein). | | | | | | | | |

TABLE III

VEGFr Synthetic Modified siNA constructs

| | | | | | |
|---|---|---|---|---|---|
| | Seq | COMPOUND | | | Seq |
| Target | ID | # | Aliases | Sequence | ID |

VEGFR1

| | | | | | |
|---|---|---|---|---|---|
| GCUGUCUGCUUCUCACAGGAUCU | 1997 | | FLT1:298U21 siNA sense | UGUCUGCUUCUCACAGGAUTT | 2020 |
| GAAGGAGAGGACCUGAAACUGUC | 1998 | | FLT1:1956U21 siNA sense | AGGAGAGGACCUGAAACUGTT | 2021 |
| AAGGAGAGGACCUGAAACUGUCU | 1999 | | FLT1:1957U21 siNA sense | GGAGAGGACCUGAAACUGUTT | 2022 |
| GCAUUUGGCAUUAAGAAAUCACC | 2000 | | FLT1:2787U21 siNA sense | AUUUGGCAUUAAGAAAUCATT | 2023 |
| GCUGUCUGCUUCUCACAGGAUCU | 1997 | | FLT1:316L21 siNA (298C) | AUCCUGUGAGAAGCAGACATT | 2024 |
| | | | antisense | | |
| GAAGGAGAGGACCUGAAACUGUC | 1998 | | FLT1:1974L21 siNA (1956C) | CAGUUUCAGGUCCUCUCCUTT | 2025 |
| | | | antisense | | |
| AAGGAGAGGACCUGAAACUGUCU | 1999 | | FLT1:1975L21 siNA (1957C) | ACAGUUUCAGGUCCUCUCCTT | 2026 |
| | | | antisense | | |
| GCAUUUGGCAUUAAGAAAUCACC | 2000 | | FLT1:2805L21 siNA (2787C) | UGAUUUCUUAAUGCCAAAUTT | 2027 |
| | | | antisense | | |
| GCUGUCUGCUUCUCACAGGAUCU | 1997 | | FLT1:298U21 siNA stab04 sense | B uGucuGcuucucAcAGGAuTT B | 2028 |
| GAAGGAGAGGACCUGAAACUGUC | 1998 | | FLT1:1956U21 siNA stab04 sense | B AGGAGAGGAccuGAAAcuGTT B | 2029 |
| AAGGAGAGGACCUGAAACUGUCU | 1999 | | FLT1:1957U21 siNA stab04 sense | B GGAGAGGAccuGAAAcuGuTT B | 2030 |
| GCAUUUGGCAUUAAGAAAUCACC | 2000 | | FLT1:2787U21 siNA stab04 sense | B AuuuGGcAuuAAGAAAucATT B | 2031 |
| GCUGUCUGCUUCUCACAGGAUCU | 1997 | | FLT1:316L21 siNA (298C) stab05 | AuccuGuGAGAAGcAGAcATsT | 2032 |
| | | | antisense | | |
| GAAGGAGAGGACCUGAAACUGUC | 1998 | | FLT1:1974L21 siNA (1956C) stab05 | cAGuuucAGGuccucuccuTsT | 2033 |
| | | | antisense | | |
| AAGGAGAGGACCUGAAACUGUCU | 1999 | | FLT1:1975L21 siNA (1957C) stab05 | AcAGuuucAGGuccucuccTsT | 2034 |
| | | | antisense | | |
| GCAUUUGGCAUUAAGAAAUCACC | 2000 | | FLT1:2805L21 siNA (2787C) stab05 | uGAuuucuuAAuGccAAAuTsT | 2035 |
| | | | antisense | | |
| GCUGUCUGCUUCUCACAGGAUCU | 1997 | | FLT1:298U21 siNA stab07 sense | B uGucuGcuucucAcAGGAuTT B | 2036 |
| GAAGGAGAGGACCUGAAACUGUC | 1998 | | FLT1:1956U21 siNA stab07 sense | B AGGAGAGGAccuGAAAcuGTT B | 2037 |
| AAGGAGAGGACCUGAAACUGUCU | 1999 | | FLT1:1957U21 siNA stab07 sense | B GGAGAGGAccuGAAAcuGuTT B | 2038 |
| GCAUUUGGCAUUAAGAAAUCACC | 2000 | | FLT1:2787U21 siNA stab07 sense | B AuuuGGcAuuAAGAAAucATT B | 2039 |
| GCUGUCUGCUUCUCACAGGAUCU | 1997 | | FLT1:316L21 siNA (298C) stab11 | AuccuGuGAGAAGcAGAcATsT | 2040 |
| | | | antisense | | |
| GAAGGAGAGGACCUGAAACUGUC | 1998 | | FLT1:1974L21 siNA (1956C) | cAGuuucAGGuccucuccuTsT | 2041 |
| | | | stab11 antisense | | |
| AAGGAGAGGACCUGAAACUGUCU | 1999 | | FLT1:1975L21 siNA (1957C) | AcAGuuucAGGuccucuccTsT | 2042 |
| | | | stab11 antisense | | |
| GCAUUUGGCAUUAAGAAAUCACC | 2000 | | FLT1:2805L21 siNA (2787C) | uGAuuucuuAAuGccAAAuTST | 2043 |
| | | | stab11 antisense | | |
| AACUGAGUUUAAAAGGCACCCAG | 2009 | 31209 | FLT1:367L21 siNA (349C) stab05 | GAcucAAAuuuuccGuGGGTsT | 2176 |
| | | | inv antisense | | |
| AAGCAAGGAGGGCCUCUGAUGGU | 2012 | 31210 | FLT1:2967L21 siNA (2949C) | cGuuccucccGGAGAcuAcTsT | 2177 |
| | | | stab05 inv antisense | | |
| AGCCUGGAAAGAAUCAAAACCUU | 2011 | 31211 | FLT1:3930L21 siNA (3912C) | GGAccuuucuuAGuuuuGGTsT | 2178 |
| | | | stab05 inv antisense | | |
| AACUGAGUUUAAAAGGCACCCAG | 2009 | 31212 | FLT1:349U21 siNA stab07 | B cccAcGGAAAAuuuGAGucTT B | 2179 |
| | | | inv sense | | |
| AAGCAAGGAGGGCCUCUGAUGGU | 2012 | 31213 | FLT1:2949U21 siNA stab07 | B GuAGucuccGGGAGGAAcGTT B | 2180 |
| | | | inv sense | | |
| AGCCUGGAAAGAAUCAAAACCUU | 2011 | 31214 | FLT1:3912U21 siNA stab07 | B ccAAAAcuAAGAAAGGuccTT B | 2181 |
| | | | inv sense | | |
| AACUGAGUUUAAAAGGCACCCAG | 2009 | 31215 | FLT1:367L21 siNA (349C) stab08 | +E,und GAcucAAAuuuuccGuGGGTsT | 2182 |
| | | | inv antisense | | |
| AAGCAAGGAGGGCCUCUGAUGGU | 2012 | 31216 | FLT1:2967L21 siNA (2949C) | cGuuccucccGGAGAcuAcTsT | 2183 |
| | | | stab08 inv antisense | | |
| AGCCUGGAAAGAAUCAAAACCUU | 2011 | 31217 | FLT1:3930L21 siNA (3912C) | GGAccuuucuuAGuuuuGGTsT | 2184 |
| | | | stab08 inv antisense | | |
| AACUGAGUUUAAAAGGCACCCAG | 2009 | 31270 | FLT1:349U21 siNA stab09 sense | B CUGAGUUUAAAAGGCACCCTT B | 2185 |
| AAGCAAGGAGGGCCUCUGAUGGU | 2012 | 31271 | FLT1:2949U21 siNA stab09 sense | B GCAAGGAGGGCCUCUGAUGTT B | 2186 |
| AGCCUGGAAAGAAUCAAAACCUU | 2011 | 31272 | FLT1:3912U21 siNA stab09 sense | B CCUGGAAAGAAUCAAAACCTT B | 2187 |
| AACUGAGUUUAAAAGGCACCCAG | 2009 | 31273 | FLT1:367L21 siNA (349C) stab10 | GGGUGCCUUUUAAACUCAGTsT | 2188 |
| | | | antisense | | |
| AAGCAAGGAGGGCCUCUGAUGGU | 2012 | 31274 | FLT1:2967L21 siNA (2949C) | CAUCAGAGGCCCUCCUUGCTsT | 2189 |
| | | | stab10 antisense | | |
| AGCCUGGAAAGAAUCAAAACCUU | 2011 | 31275 | FLT1:3930L21 siNA (3912C) | GGUUUUGAUUCUUUCCAGGTsT | 2190 |
| | | | stab10 antisense | | |
| AACUGAGUUUAAAAGGCACCCAG | 2009 | 31276 | FLT1:349U21 siNA stab09 inv | B CCCACGGAAAAUUUGAGUCTT B | 2191 |
| | | | sense | | |
| AAGCAAGGAGGGCCUCUGAUGGU | 2012 | 31277 | FLT1:2949U21 siNA stab09 | B GUAGUCUCCGGGAGGAACGTT B | 2192 |
| | | | inv sense | | |
| AGCCUGGAAAGAAUCAAAACCUU | 2011 | 31278 | FLT1:3912U21 siNA stab09 | B CCAAAACUAAGAAAGGUCCTT B | 2193 |
| | | | inv sense | | |
| AACUGAGUUUAAAAGGCACCCAG | 2009 | 31279 | FLT1:367L21 siNA (349C) stab10 | GACUCAAAUUUUCCGUGGGTsT | 2194 |
| | | | inv antisense | | |
| AAGCAAGGAGGGCCUCUGAUGGU | 2012 | 31280 | FLT1:2967L21 siNA (2949C) | CGUUCCUCCCGGAGACUACTsT | 2195 |
| | | | stab10 inv antisense | | |
| AGCCUGGAAAGAAUCAAAACCUU | 2011 | 31281 | FLT1:3930L21 siNA (3912C) | GGACCUUUCUUAGUUUUGGTsT | 2196 |
| | | | stab10 inv antisense | | |
| AACAACCACAAAAUACAACAAGA | 2010 | 31424 | FLT1:2358L21 siNA (2340C) | uuGuuGuAuuuuGuGGuuGXsX | 2197 |
| | | | stab11 3′-BrdU antisense | | |
| AAGCAAGGAGGGCCUCUGAUGGU | 2012 | 31425 | FLT1:2967L21 siNA (2949C) | cAucAGAGGcccuccuuGcXsX | 2198 |
| | | | stab11 3′-BrdU antisense | | |
| AACAACCACAAAAUACAACAAGA | 2010 | 31442 | FLT1:2358L21 siNA (2340C) | uuGuuGuAuuuuGuGGuuGXsT | 2199 |
| | | | stab11 3′-BrdU antisense | | |
| AAGCAAGGAGGGCCUCUGAUGGU | 2012 | 31443 | FLT1:2967L21 siNA (2949C) | cAucAGAGGcccuccuuGcXsT | 2200 |
| | | | stab11 3′-BrdU antisense | | |
| AACAACCACAAAAUACAACAAGA | 2010 | 31449 | FLT1:2340U21 siNA stab09 sense | B CAACCACAAAAUACAACAATT B | 2201 |
| AACAACCACAAAAUACAACAAGA | 2010 | 31450 | FLT1:2340U21 siNA inv stab09 | B AACAACAUAAAACACCAACTT B | 2202 |
| | | | sense | | |
| AACAACCACAAAAUACAACAAGA | 2010 | 31451 | FLT1:2358L21 siNA (2340C) | UUGUUGUAUUUUGUGGUUGTsT | 2203 |
| | | | stab10 antisense | | |
| AACAACCACAAAAUACAACAAGA | 2010 | 31452 | FLT1:2358L21 siNA (2340C) | GUUGGUGUUUUAUGUUGUUTsT | 2204 |
| | | | inv stab10 antisense | | |
| AACAACCACAAAAUACAACAAGA | 2010 | 31509 | FLT1:2358L21 siNA (2340C) | uuGuuGuAuuuuGuGGuuGTsT | 2217 |
| | | | stab11 antisense | | |
| AACUGAGUUUAAAAGGCACCCAG | 2009 | 31794 | 2× cholesterol + R31194 | (H)2 ZTa B | 2218 |
| | | | FLT1:349U21 siNA stab07 sense | cuGAGuuuAAAAGGcAcccTT B | |
| AACUGAGUUUAAAAGGCACCCAG | 2009 | 31795 | 2× cholesterol + R31212 | (H)2 ZTA B | 2219 |
| | | | FLT1:349U21 siNA stab07 inv | cccAcGGAAAAuuuGAGucTT B | |
| | | | sense | | |
| AACUGAGUUUAAAAGGCACCCAG | 2009 | 31796 | 2× cholesterol + R31270 | (H)2 ZTA B | 2220 |
| | | | FLT1:349U21 siNA stab09 sense | CUGAGUUUAAAAGGCACCCTT B | |
| AACUGAGUUUAAAAGGCACCCAG | 2009 | 31797 | 2× cholesterol + R31276 | (H)2 ZTA B | 2221 |
| | | | FLT1:349U21 siNA stab09 inv | CCCACGGAAAAUUUGAGUCTT B | |
| | | | sense | | |
| AACUGAGUUUAAAAGGCACCCAG | 2009 | 31798 | 2× C18 phospholipid + R31194 | (L)2 ZTa B | 2222 |
| | | | FLT1:349U21 siNA stab07 sense | cuGAGuuuAAAAGGcAcccTT B | |
| AACUGAGUUUAAAAGGCACCCAG | 2009 | 31799 | 2× C18 phospholipid + R31212 | (L)2 ZTa B | 2223 |
| | | | FLT1:349U21 siNA stab07 inv | cccAcGGAAAAuuuGAGucTT B | |
| | | | sense | | |
| AACUGAGUUUAAAAGGCACCCAG | 2009 | 31800 | 2× C18 phospholipid + R31270 | (L)2 ZTA B | 2224 |
| | | | FLT1:349U21 siNA stab09 sense | CUGAGUUUAAAAGGCACCCTT B | |
| AACUGAGUUUAAAAGGCACCCAG | 2009 | 31801 | 2× C18 phospholipid + R31276 | (L)2 ZTA B | 2225 |
| | | | FLT1:349U21 siNA stab09 inv | CCCACGGAAAAUUUGAGUCTT B | |
| | | | sense | | |
| CAUGCUGGACUGCUGGCAC | 2244 | 32235 | FLT1:3645U21 siNA sense | CAUGCUGGACUGCUGGCACTT | 2275 |
| AUGCUGGACUGCUGGCACA | 2245 | 32236 | FLT1:3646U21 siNA sense | AUGCUGGACUGCUGGCACATT | 2276 |
| UGCUGGACUGCUGGCACAG | 2246 | 32237 | FLT1:3647U21 siNA sense | UGCUGGACUGCUGGCACAGTT | 2277 |
| CAUGCUGGACUGCUGGCAC | 2244 | 32250 | FLT1:3663L21 siNA (3645C) | GUGCCAGCAGUCCAGCAUGTT | 2278 |
| | | | antisense | | |
| AUGCUGGACUGCUGGCACA | 2245 | 32251 | FLT1:3664L21 siNA (3646C) | UGUGCCAGCAGUCCAGCAUTT | 2279 |
| | | | antisense | | |
| UGCUGGACUGCUGGCACAG | 2246 | 32252 | FLT1:3665L21 siNA (3647C) | CUGUGCCAGCAGUCCAGCATT | 2280 |
| | | | antisense | | |
| AACUGAGUUUAAAAGGCACCCAG | 2009 | 32278 | FLT1:349U21 siNA stab16 sense | B CUgagUUUaaaaggCaCCCTT B | 2281 |
| AACUGAGUUUAAAAGGCACCCAG | 2009 | 32279 | FLT1:349U21 siNA stab18 sense | B cuGAGuuuAAAAGGcAcccTT B | 2282 |
| AACUGAGUUUAAAAGGCACCCAG | 2009 | 32280 | FLT1:349U21 siNA inv stab16 | B CCCaCggaaaaUUUgagUCTT B | 2283 |
| | | | sense | | |
| AACUGAGUUUAAAAGGCACCCAG | 2009 | 32281 | FLT1:349U21 siNA inv stab18 | B cccAcGGAAAAuuuGAGucTT B | 2284 |
| | | | sense | | |
| CUGAACUGAGUUUAAAAGGCACC | 2247 | 32282 | FLT1:346U21 siNA stab09 sense | B GAACUGAGUUUAAAAGGCATT B | 2285 |
| UGAACUGAGUUUAAAAGGCACCC | 2248 | 32283 | FLT1:347U21 siNA stab09 sense | B AACUGAGUUUAAAAGGCACTT B | 2286 |
| GAACUGAGUUUAAAAGGCACCCA | 2249 | 32284 | FLT1:348U21 siNA stab09 sense | B ACUGAGUUUAAAAGGCACCTT B | 2287 |
| ACUGAGUUUAAAAGGCACCCAGC | 2250 | 32285 | FLT1:350U21 siNA stab09 sense | B UGAGUUUAAAAGGCACCCATT B | 2288 |
| CUGAGUUUAAAAGGCACCCAGCA | 2251 | 32286 | FLT1:351U21 siNA stab09 sense | B GAGUUUAAAAGGCACCCAGTT B | 2289 |
| UGAGUUUAAAAGGCACCCAGCAC | 2252 | 32287 | FLT1:352U21 siNA stab09 sense | B AGUUUAAAAGGCACCCAGCTT B | 2290 |
| GAGUUUAAAAGGCACCCAGCACA | 2253 | 32288 | FLT1:353U21 siNA stab09 sense | B GUUUAAAAGGCACCCAGCATT B | 2291 |
| CUGAACUGAGUUUAAAAGGCACC | 2247 | 32289 | FLT1:364L21 siNA (346C) stab10 | UGCCUUUUAAACUCAGUUCTsT | 2292 |
| | | | antisense | | |
| UGAACUGAGUUUAAAAGGCACCC | 2248 | 32290 | FLT1:365L21 siNA (347C) stab10 | GUGCCUUUUAAACUCAGUUTsT | 2293 |
| | | | antisense | | |
| GAACUGAGUUUAAAAGGCACCCA | 2249 | 32291 | FLT1:366L21 siNA (348C) stab10 | GGUGCCUUUUAAACUCAGUTsT | 2294 |
| | | | antisense | | |
| ACUGAGUUUAAAAGGCACCCAGC | 2250 | 32292 | FLT1:368L21 siNA (350C) stab10 | UGGGUGCCUUUUAAACUCATsT | 2295 |
| | | | antisense | | |
| CUGAGUUUAAAAGGCACCCAGCA | 2251 | 32293 | FLT1:369L21 siNA (351C) stab10 | CUGGGUGCCUUUUAAACUCTsT | 2296 |
| | | | antisense | | |
| UGAGUUUAAAAGGCACCCAGCAC | 2252 | 32294 | FLT1:370L21 siNA (352C) stab10 | GCUGGGUGCCUUUUAAACUTsT | 2297 |
| | | | antisense | | |
| GAGUUUAAAAGGCACCCAGCACA | 2253 | 32295 | FLT1:371L21 siNA (353C) stab10 | UGCUGGGUGCCUUUUAAACTsT | 2298 |
| | | | antisense | | |
| CUGAACUGAGUUUAAAAGGCACC | 2247 | 32296 | FLT1:346U21 siNA inv stab09 | B ACGGAAAAUUUGAGUCAAGTT B | 2299 |
| | | | sense | | |
| UGAACUGAGUUUAAAAGGCACCC | 2248 | 32297 | FLT1:347U21 siNA inv stab09 | B CACGGAAAAUUUGAGUCAATT B | 2300 |
| | | | sense | | |
| GAACUGAGUUUAAAAGGCACCCA | 2249 | 32298 | FLT1:348U21 siNA inv stab09 | B CCACGGAAAAUUUGAGUCATT B | 2301 |
| | | | sense | | |
| ACUGAGUUUAAAAGGCACCCAGC | 2250 | 32299 | FLT1:350U21 siNA inv stab09 | B ACCCACGGAAAAUUUGAGUTT B | 2302 |
| | | | sense | | |
| CUGAGUUUAAAAGGCACCCAGCA | 2251 | 32300 | FLT1:351U21 siNA inv stab09 | B GACCCACGGAAAAUUUGAGTT B | 2303 |
| | | | sense | | |
| UGAGUUUAAAAGGCACCCAGCAC | 2252 | 32301 | FLT1:352U21 siNA inv stab09 | B CGACCCACGGAAAAUUUGATT B | 2304 |
| | | | sense | | |
| GAGUUUAAAAGGCACCCAGCACA | 2253 | 32302 | FLT1:353U21 siNA inv stab09 | B ACGACCCACGGAAAAUUUGTT B | 2305 |
| | | | sense | | |
| CUGAACUGAGUUUAAAAGGCACC | 2247 | 32303 | FLT1:364L21 siNA (346C) inv | CUUGACUCAAAUUUUCCGUTsT | 2306 |
| | | | stab10 antisense | | |
| UGAACUGAGUUUAAAAGGCACCC | 2248 | 32304 | FLT1:365L21 siNA (347C) inv | UUGACUCAAAUUUUCCGUGTsT | 2307 |
| | | | stab10 antisense | | |
| GAACUGAGUUUAAAAGGCACCCA | 2249 | 32305 | FLT1:366L21 siNA (348C) inv | UGACUCAAAUUUUCCGUGGTsT | 2308 |
| | | | stab10 antisense | | |
| ACUGAGUUUAAAAGGCACCCAGC | 2250 | 32306 | FLT1:368L21 siNA (350C) inv | ACUCAAAUUUUCCGUGGGUTsT | 2309 |
| | | | stab10 antisense | | |
| CUGAGUUUAAAAGGCACCCAGCA | 2251 | 32307 | FLT1:369L21 siNA (351C) inv | CUCAAAUUUUCCGUGGGUCTsT | 2310 |
| | | | stab10 antisense | | |
| UGAGUUUAAAAGGCACCCAGCAC | 2252 | 32308 | FLT1:370L21 siNA (352C) inv | UCAAAUUUUCCGUGGGUCGTsT | 2311 |
| | | | stab10 antisense | | |
| GAGUUUAAAAGGCACCCAGCACA | 2253 | 32309 | FLT1:371L21 siNA (353C) inv | CAAAUUUUCCGUGGGUCGUTsT | 2312 |
| | | | stab10 antisense | | |
| AACUGAGUUUAAAAGGCACCCAG | 2009 | 32338 | FLT1:367L21 siNA (349C) | GGGUGCCUUUUAAACUCAGXsT | 2313 |
| | | | stab10 3′-BrdU antisense | | |
| AACUGAGUUUAAAAGGCACCCAG | 2009 | 32718 | FLT1:367L21 siNA (349C) v1 | pGGGUGCCUUUUAAACUC | 2314 |
| | | | 5′p antisense | GAGUUUAAAAG B | |
| AACUGAGUUUAAAAGGCACCCAG | 2009 | 32719 | FLT1:367L21 siNA (349C) v2 | pGGGUGCCUUUUAAACUCAG | 2315 |
| | | | 5′p antisense | GAGUUUAAAAG B | |
| AAGCAAGGAGGGCCUCUGAUGGU | 2012 | 32720 | FLT1:2967L21 siNA (2949C) v1 | pCAUCAGAGGCCCUCCUUGC | 2316 |
| | | | 5′p antisense | AAGGAGGGCCUCU B | |
| AAGCAAGGAGGGCCUCUGAUGGU | 2012 | 32721 | FLT1:2967L21 siNA (2949C) v2 | pCAUCAGAGGCCCUCCUU | 2317 |
| | | | 5′p antisense | AAGGAGGGCCUCUG B | |
| AAGCAAGGAGGGCCUCUGAUGGU | 2012 | 32722 | FLT1:2967L21 siNA (2949C) v3 | pCAUCAGAGGCCCUCCU | 2318 |
| | | | 5′p antisense | AGGAGGGCCUCUG B | |
| CUGAACUGAGUUUAAAAGGCACC | 2247 | 32748 | FLT1:346U21 siNA stab07 sense | B GAAcuGAGuuuAAAAGGcATT B | 2319 |
| UGAACUGAGUUUAAAAGGCACCC | 2248 | 32749 | FLT1:347U21 siNA stab07 sense | B AAcuGAGuuuAAAAGGcAcTT B | 2320 |
| GAACUGAGUUUAAAAGGCACCCA | 2249 | 32750 | FLT1:348U21 siNA stab07 sense | B AcuGAGuuuAAAAGGcAccTT B | 2321 |
| ACUGAGUUUAAAAGGCACCCAGC | 2250 | 32751 | FLT1:350U21 siNA stab07 sense | B uGAGuuuAAAAGGcAcccATT B | 2322 |
| CUGAGUUUAAAAGGCACCCAGCA | 2251 | 32752 | FLT1:351U21 siNA stab07 sense | B GAGuuuAAAAGGcAcccAGTT B | 2323 |
| UGAGUUUAAAAGGCACCCAGCAC | 2252 | 32753 | FLT1:352U21 siNA stab07 sense | B AGuuuAAAAGGcAcccAGcTT B | 2324 |
| GAGUUUAAAAGGCACCCAGCACA | 2253 | 32754 | FLT1:353U21 siNA stab07 sense | B GuuuAAAAGGcAcccAGcATT B | 2325 |
| CUGAACUGAGUUUAAAAGGCACC | 2247 | 32755 | FLT1:364L21 siNA (346C) stab08 | uGccuuuuAAAcucAGuucTsT | 2326 |
| | | | antisense | | |
| UGAACUGAGUUUAAAAGGCACCC | 2248 | 32756 | FLT1:365L21 siNA (347C) stab08 | GuGccuuuuAAAcucAGuuTsT | 2327 |
| | | | antisense | | |
| GAACUGAGUUUAAAAGGCACCCA | 2249 | 32757 | FLT1:366L21 siNA (348C) stab08 | GGuGccuuuuAAAcucAGuTsT | 2328 |
| | | | antisense | | |
| ACUGAGUUUAAAAGGCACCCAGC | 2250 | 32758 | FLT1:368L21 siNA (350C) stab08 | uGGGuGccuuuuAAAcucATsT | 2329 |
| | | | antisense | | |
| CUGAGUUUAAAAGGCACCCAGCA | 2251 | 32759 | FLT1:369L21 siNA (351C) stab08 | cuGGGuGccuuuuAAAcucTsT | 2330 |
| | | | antisense | | |
| UGAGUUUAAAAGGCACCCAGCAC | 2252 | 32760 | FLT1:370L21 siNA (352C) stab08 | GcuGGGuGccuuuuAAAcuTsT | 2331 |
| | | | antisense | | |
| GAGUUUAAAAGGCACCCAGCACA | 2253 | 32761 | FLT1:371L21 siNA (353C) stab08 | uGcuGGGuGccuuuuAAAcTsT | 2332 |
| | | | antisense | | |
| CUGAACUGAGUUUAAAAGGCACC | 2247 | 32772 | FLT1:346U21 siNA inv stab07 sense | B AcGGAAAAuuuGAGucAAGTT B | 2333 |
| UGAACUGAGUUUAAAAGGCACCC | 2248 | 32773 | GLT1:347U21 siNA inv stab07 sense | B cAcGGAAAAuuuGAGucAATT B | 2334 |
| GAACUGAGUUUAAAAGGCACCCA | 2249 | 32774 | FLT1:348U21 siNA inv stab07 sense | B ccAcGGAAAAuuuGAGucATT B | 2335 |
| ACUGAGUUUAAAAGGCACCCAGC | 2250 | 32775 | FLT1:350U21 siNA inv stab07 sense | B AcccAcGGAAAAuuuGAGuTT B | 2336 |
| CUGAGUUUAAAAGGCACCCAGCA | 2251 | 32776 | FLT1:351U21 siNA inv stab07 sense | B GAcccAcGGAAAAuuuGAGTT B | 2337 |
| UGAGUUUAAAAGGCACCCAGCAC | 2252 | 32777 | FLT1:352U21 siNA inv stab07 sense | B cGAcccAcGGAAAAuuuGATT B | 2338 |
| GAGUUUAAAAGGCACCCAGCACA | 2253 | 32778 | FLT1:353U21 siNA inv stab07 sense | B AcGAcccAcGGAAAAuuuGTT B | 2339 |
| CUGAACUGAGUUUAAAAGGCACC | 2247 | 32779 | FLT1:364L21 siNA (346C) inv stab08 | cuuGAcucAAAuuuuccGuTsT | 2340 |
| | | | antisense | | |
| UGAACUGAGUUUAAAAGGCACCC | 2248 | 32780 | FLT1:365L21 siNA (347C) inv | uuGAcucAAAuuuuccGuGTsT | 2341 |
| | | | stab08 antisense | | |
| GAACUGAGUUUAAAAGGCACCCA | 2249 | 32781 | FLT1:366L21 siNA (348C) inv | uGAcucAAAuuuuccGuGGTsT | 2342 |
| | | | stab08 antisense | | |
| ACUGAGUUUAAAAGGCACCCAGC | 2250 | 32782 | FLT1:368L21 siNA (350C) inv | AcucAAAuuuuccGuGGGuTsT | 2343 |
| | | | stab08 antisense | | |
| CUGAGUUUAAAAGGCACCCAGCA | 2251 | 32783 | FLT1:369L21 siNA (351C) inv | cucAAAuuuuccGuGGGucTsT | 2344 |
| | | | stab08 antisense | | |
| UGAGUUUAAAAGGCACCCAGCAC | 2252 | 32784 | FLT1:370L21 siNA (352C) inv | ucAAAuuuuccGuGGGucGTsT | 2345 |
| | | | stab08 antisense | | |
| GAGUUUAAAAGGCACCCAGCACA | 2253 | 32785 | FLT1:371L21 siNA (353C) inv | cAAAuuuuccGuGGGucGuTsT | 2346 |
| | | | stab08 antisense | | |
| AGTTTAAAAGGCACCCAGCACATC | 2254 | 32805 | FLT1:373L21 siNA (354C) v1 | pGUGCUGGGUGCCUUUUAAA | 2347 |
| | | | 5′p antisense | AGGCACCCAGC B | |
| AGTTTAAAAGGCACCCAGCACATC | 2254 | 32806 | FLT1:373L21 siNA (354C) v2 | pGUGCUGGGUGCCUUUAAA | 2348 |
| | | | 5′p antisense | GGCACCCAGC B | |
| AGTTTAAAAGGCACCCAGCACATC | 2254 | 32807 | FLT1:373L21 siNA (354C) v3 | pGUGCUGGGUGCCUUAAGGCAC | 2349 |
| | | | 5′p antisense | CCAGC B | |
| GCATATATATGATAAAGCATTCA | 2255 | 32808 | FLT1:1247L21 siNA (1229C) v1 | pAAUGCUUUAUCAUAUAUAU | 2350 |
| | | | 5′p antisense | GAUAAAGC B | |
| GCATATATATGATAAAGCATTCA | 2255 | 32809 | FLT1:1247L21 siNA (1229C) v2 | pAAUGCUUUAUCAUAUAU | 2351 |
| | | | 5′p antisense | GAUAAAGC B | |
| GCATATATATGATAAAGCATTCA | 2255 | 32810 | FLT1:1247L21 siNA (1229C) v3 | pAAUGCUUUAUCAUAU | 2352 |
| | | | 5′p antisense | GAUAAAGC B | |
| GCATATATATGATAAAGCATTCA | 2255 | 32811 | FLT1:1247L21 siNA (1229C) v4 | pAAUGCUUUAUCAUAU | 2353 |
| | | | 5′p antisense | GAUAAAGCA B | |
| GCATATATATGATAAAGCATTCA | 2255 | 32812 | FLT1:1247L21 siNA (1229C) v5 | pAAUGCUUUAUCAUAUAU | 2354 |
| | | | 5′p antisense | GAUAAAGCAUU B | |
| GCATATATATGATAAAGCATTCA | 2255 | 32813 | FLT1:1247L21 siNA (1229C) v6 | pAAUGCUUUAUCAUAU | 2355 |
| | | | 5′p antisense | GAUAAAGCAUU B | |
| AACUGAGUUUAAAAGGCACCCAG | 2009 | 33056 | FLT1:367L21 siNA (349C) v3 | pGGGUGCCUUUUAAACUCAG | 2356 |
| | | | 5′p antisense | GAGUUUAAAAGG B | |
| AACUGAGUUUAAAAGGCACCCAG | 2009 | 33057 | FLT1:367L21 siNA (349C) v4 | pGGGUGCCUUUUAAACUC | 2357 |
| | | | 5′p antisense | GAGUUUAAAAGGCA B | |
| AACUGAGUUUAAAAGGCACCCAG | 2009 | 33058 | FLT1:367L21 siNA (349C) v5 | pGGGUGCCUUUUAAACU | 2358 |
| | | | 5′p antisense | AGUUUAAAAGG B | |
| AACUGAGUUUAAAAGGCACCCAG | 2009 | 33059 | FLT1:367L21 siNA (349C) v6 | pGGGUGCCUUUUAAACU | 2359 |
| | | | 5′p antisense | AGUUUAAAAGGC B | |
| AACUGAGUUUAAAAGGCACCCAG | 2009 | 33060 | FLT1:367L21 siNA (349C) v7 | pGGGUGCCUUUUAAACU | 2360 |
| | | | 5′p antisense | AGUUUAAAAGGCA B | |
| AACUGAGUUUAAAAGGCACCCAG | 2009 | 33061 | FLT1:367L21 siNA (349C) v8 | pGGGUGCCUUUUAAACU | 2361 |
| | | | 5′p antisense | AGUUUAAAAGGCAC B | |
| AACUGAGUUUAAAAGGCACCCAG | 2009 | 33062 | FLT1:367L21 siNA (349C) v9 | pGGGUGCCUUUUAAAC | 2362 |
| | | | 5′p antisense | GUUUAAAAGGC B | |
| AACUGAGUUUAAAAGGCACCCAG | 2009 | 33063 | FLT1:367L21 siNA (349C) v10 | pGGGUGCCUUUUAAAC | 2363 |
| | | | 5′p antisense | GUUUAAAAGGCA B | |
| AACUGAGUUUAAAAGGCACCCAG | 2009 | 33064 | FLT1:367L21 siNA (349C) v11 | pGGGUGCCUUUUAAAC | 2364 |
| | | | 5′p antisense | GUUUAAAAGGCAC B | |
| AACUGAGUUUAAAAGGCACCCAG | 2009 | 33121 | FLT1:349U21 siNA stab22 | CUGAGUUUAAAAGGCACCCTTB | 2444 |
| AACUGAGUUUAAAAGGCACCCAG | 2009 | 33321 | FLT1:367L21 siNA (349C) | pGGGuGccuuuuAAAcucAGTsT | 2445 |
| | | | stab08 + 5′P | | |
| AACUGAGUUUAAAAGGCACCCAG | 2009 | 33338 | FLT1:367L21 siNA (349C) | L GGGuGccuuuuAAAcucAGTsT | 2447 |
| | | | stab08 + 5′ aminoL | | |
| AACUGAGUUUAAAAGGCACCCAG | 2009 | 33553 | FLT1:367L21 siNA (349C) | L GGGuGccuuuuAAAcucAGTsT | 2447 |
| | | | stab08 + 5′ aminoL | | |
| AACUGAGUUUAAAAGGCACCCAG | 2009 | 33571 | FLT1:367L21 siNA (349C) | IGGUGCCUUUUAAACUCAGTT | 2448 |
| | | | stab10 + 5′I | | |
| CAUGCUGGACUGCUGGCAC | 2244 | 33725 | FLT1:3645U21 siNA stab07 | B cAuGcuGGAcuGcuGGcAcTT B | 2449 |
| AUGCUGGACUGCUGGCACA | 2245 | 33726 | FLT1:3646U21 siNA stab07 | B AuGcuGGAcuGcuGGcAcATT B | 2450 |
| CAUGCUGGACUGCUGGCAC | 2244 | 33731 | FLT1:3663L21 siNA (3645C) | GuGccAGcAGuccAGcAuGTsT | 2451 |
| | | | stab08 | | |
| AUGCUGGACUGCUGGCACA | 2245 | 33732 | FLT1:3664L21 siNA (3646C) | uGuGccAGcAGuccAGcAuTsT | 2452 |
| | | | stab08 | | |
| CAUGCUGGACUGCUGGCAC | 2244 | 33737 | FLT1:3645U21 siNA stab09 | B CAUGCUGGACUGCUGGCACTT B | 2453 |
| AUGCUGGACUGCUGGCACA | 2245 | 33738 | FLT1:3646U21 siNA stab09 | B AUGCUGGACUGCUGGCACATT B | 2454 |
| CAUGGUGGACUGCUGGCAC | 2244 | 33743 | FLT1:3663L21 siNA (3645C) | GUGCCAGCAGUCCAGCAUGTsT | 2455 |
| | | | stab10 | | |
| AUGGUGGACUGCUGGCACA | 2245 | 33744 | FLT1:3664L21 siNA (3646C) | UGUGCCAGCAGUCCAGCAUTsT | 2456 |
| | | | stab10 | | |
| CAUGCUGGACUGCUGGCAC | 2244 | 33749 | FLT1:3645U21 siNA inv stab07 | B cAcGGucGucAGGucGuAcTT B | 2457 |
| AUGCUGGACUGCUGGCACA | 2245 | 33750 | FLT1:3646U21 siNA inv stab07 | B AcAcGGucGucAGGucGuATT B | 2458 |
| CAUGCUGGACUGCUGGCAC | 2244 | 33755 | FLT1:3663L21 siNA (3645C) | GuAcGAccuGAcGAccGuGTsT | 2459 |
| | | | inv stab08 | | |
| AUGCUGGACUGCUGGCACA | 2245 | 33756 | FLT1:3664L2i siNA (3646C) | uAcGAccuGAcGAccGuGuTsT | 2460 |
| | | | inv stab08 | | |
| CAUGCUGGACUGCUGGCAC | 2244 | 33761 | FLT1:3645U21 siNA inv stab09 | B CACGGUCGUCAGGUCGUACTT B | 2461 |
| AUGCUGGACUGCUGGCACA | 2245 | 33762 | FLT1:3646U21 siNA inv stab09 | B ACACGGUCGUCAGGUCGUATT B | 2462 |
| CAUGCUGGACUGCUGGCAC | 2244 | 33767 | FLT1:3663L21 siNA (3645C) | GUACGACCUGACGACCGUGTsT | 2463 |
| | | | inv stab10 | | |
| AUGCUGGACUGCUGGCACA | 2245 | 33768 | FLT1:3664L21 siNA (3646C) | UACGACCUGACGACCGUGUTsT | 2464 |
| | | | inv stab10 | | |
| AGUUUAAAAGGCACCCAGCACAU | 2438 | 34092 | FLT1:373L18 siNA (354C) v4 | pUGCUGGGUGCCUUUUAAA | 2465 |
| | | | 5′p | AGGCACCCAGC B | |
| AGUUUAAAAGGCACCCAGCACAU | 2438 | 34093 | FLT1:373L17 siNA (354C) v5 | pGCUGGGUGCCUUUUAAA | 2466 |
| | | | 5′p | AGGCACCCAGC B | |
| AGUUUAAAAGGCACCCAGCACAU | 2438 | 34094 | FLT1:373L17 siNA (354C) v6 | pGCUGGGUGCCUUUUAAA | 2467 |
| | | | 5′p | AGGCACCCAGCT B | |
| AGUUUAAAAGGCACCCAGCACAU | 2438 | 34095 | FLT1:373L17 siNA (354C) v7 | pGCUGGGUGCCUUUUAAA | 2468 |
| | | | 5′p | AGGCACCCAG B | |
| AGUUUAAAAGGCACCCAGCACAU | 2438 | 34096 | FLT1:373L16 siNA (354C) v8 | pCUGGGUGCCUUUUAAA | 2469 |
| | | | 5′p | AGGCACCCAG B | |
| AGUUUAAAAGGCACCCAGCACAU | 2438 | 34097 | FLT1:373L16 siNA (354C) v9 | pCUGGGUGCCUUUUAAA | 2470 |
| | | | 5′p | AGGCACCCA B | |
| AGUUUAAAAGGCACCCAGCACAU | 2438 | 34098 | FLT1:373L15 siNA (354C) v10 | pUGGGUGCCUUUUAAA | 2471 |
| | | | 5′p | AGGCACCCA B | |
| AGUUUAAAAGGCACCCAGCACAU | 2438 | 34099 | FLT1:373L15 siNA (354C) v11 | pUGGGUGCCUUUUAAA | 2472 |
| | | | 5′p | AGGCACCCAT B | |
| AGUUUAAAAGGCACCCAGCACAU | 2438 | 34100 | FLT1:373L15 siNA (354C) v12 | pUGGGUGCCUUUUAAA | 2473 |
| | | | 5′p | AGGCACCCATT B | |
| GCAUAUAUAUGAUAAAGCAUUCA | 2439 | 34101 | FLT1:1247L21 siNA (1229C) | pUGCUUUAUCAUAUAUAU | 2474 |
| | | | v14 5′p | GAUAAAGCA B | |
| GCAUAUAUAUGAUAAAGCAUUCA | 2439 | 34102 | FLT1:1247L21 siNA (1229C) | pUGCUUUAUCAUAUAUAU | 2475 |
| | | | v15 5′p | GAUAAAGC B | |
| GCAUAUAUAUGAUAAAGCAUUCA | 2439 | 34103 | FLT1:1247L21 siNA (1229C) | pGCUUUAUCAUAUAUAU | 2476 |
| | | | v16 5′p | GAUAAAGC B | |
| GCAUAUAUAUGAUAAAGCAUUCA | 2439 | 34104 | FLT1:1247L17 siNA (1229C) v5 | AAUGCUUUAUCAUAUAU | 2477 |
| | | | | GAUAAAGCAUU B | |
| GCAUAUAUAUGAUAAAGCAUUCA | 2439 | 34105 | FLT1:1247L17 siNA (1229C) v7 | pAAUGCUUUAUCAUAUAU | 2478 |
| | | | 5′p | GAUAAAGCAUUT B | |
| GCAUAUAUAUGAUAAAGCAUUCA | 2439 | 34106 | FLT1:1247L17 siNA (1229C) v8 | pAAUGCUUUAUCAUAUAU | 2479 |
| | | | 5′p | GAUAAAGCAUUTT B | |
| GCAUAUAUAUGAUAAAGCAUUCA | 2439 | 34107 | FLT1:1247L17 siNA (1229C) v9 | pAAUGCUUUAUCAUAUAU | 2480 |
| | | | 5′p | GAUAAAGCAU B | |
| GCAUAUAUAUGAUAAAGCAUUCA | 2439 | 34108 | FLT1:1247L16 siNA (1229C) v10 | pAUGCUUUAUCAUAUAU | 2481 |
| | | | 5′p | GAUAAAGCAU B | |
| GCAUAUAUAUGAUAAAGCAUUCA | 2439 | 34109 | FLT1:1247L16 siNA (1229C) v11 | pAUGCUUUAUCAUAUAU | 2482 |
| | | | 5′p | GAUAAAGCAUT B | |
| GCAUAUAUAUGAUAAAGCAUUCA | 2439 | 34110 | FLT1:1247L16 siNA (1229C) v12 | pAUGCUUUAUCAUAUAU | 2483 |
| | | | 5′p | GAUAAAGCAUTT B | |
| GCAUAUAUAUGAUAAAGCAUUCA | 2439 | 34111 | FLT1:1247L16 siNA (1229C) v13 | pAUGCUUUAUCAUAUAU | 2484 |
| | | | 5′p | GAUAAAGCA B | |
| GCAUAUAUAUGAUAAAGCAUUCA | 2439 | 34112 | FLT1:1247L17 siNA (1229C) v14 | pAAUGCUUUAUCAUAUAU | 2485 |
| | | | 5′p | CUAUAAGCAUU B | |
| GCAUAUAUAUGAUAAAGCAUUCA | 2439 | 34113 | FLT1:1247L17 siNA (1229C) v15 | pAAUGCUUUUAGUUAUAU | 2486 |
| | | | 5′p | GAUAAAGCAUU B | |
| GCAUAUAUAUGAUAAAGCAUUCA | 2439 | 34114 | FLT1:1247L17 siNA (1229C) v16 | pAAUCCUUAAUCUUAUUU | 2487 |
| | | | 5′p | GAUAAAGCAUU B | |
| GCAUAUAUAUGAUAAAGCAUUCA | 2439 | 34115 | FLT1:1247L17 siNA (1229C) v17 | pAAuGcuuuAucAuAuAu | 2488 |
| | | | 5′p | GAuAAAGcAuu B | |
| GCAUAUAUAUGAUAAAGCAUUCA | 2439 | 34116 | FLT1:1247L17 siNA (1229C) v18 | pAAuGcuuuAucAuAuAu | 2489 |
| | | | 5′p | GAuAAAGcAuu B | |
| AACUGAGUUUAAAAGGCACCCAG | 2009 | 34487 | FLT1:349U21 siNA stab09 | B CsUsGAGUUUsAsAsAsAs | 2490 |
| | | | w/block PS | GGCACCsCsTsT B | |
| AACUGAGUUUAAAAGGCACCCAG | 2009 | 34488 | FLT1:367L21 siNA (349C) | GGGsUsGsCsCsUUUUAAsAsCsU | 2491 |
| | | | stab10 w/block PS | sCsAGTsT | |
| AACUGAGUUUAAAAGGCACCCAG | 2009 | 34489 | FLT1:349U21 siNA stab09 | B CsCsCACGGAsAsAsAsUs | 2492 |
| | | | inv w/block PS | UUGAGUsCsTsT B | |
| AACUGAGUUUAAAAGGCACCCAG | 2009 | 34490 | FLT1:367L21 siNA (349C) | GACsUsCsAsAsAUUUUCsCsGsUs | 2493 |
| | | | stab10 inv w/block PS | GsGGTsT | |

VEGFR2

| | | | | | |
|---|---|---|---|---|---|
| UGACCUUGGAGCAUCUCAUCUGU | 2001 | | KDR:3304U21 siNA stab04 sense | B AccuuGGAGcAucucAucuTT B | 2052 |
| UCACCUGUUUCCUGUAUGGAGGA | 2003 | | KDR:3894U21 siNA stab04 sense | B AccuGuuuccuGuAuGGAGTT B | 2054 |
| UGACCUUGGAGCAUCUCAUCUGU | 2001 | | KDR:3322L21 siNA (3304C) | AGAuGAGAuGcuccAAGGuTsT | 2056 |
| | | | stab05 antisense | | |
| UCACCUGUUUCCUGUAUGGAGGA | 2003 | | KDR:3912L21 siNA (3894C) | cuccAuAcAGGAAAcAGGuTsT | 2058 |
| | | | stab05 antisense | | |
| UGACCUUGGAGCAUCUCAUCUGU | 2001 | | KDR:3304U21 siNA stab07 sense | B AccuuGGAGcAucucAucuTT B | 2060 |
| UCACCUGUUUCCUGUAUGGAGGA | 2003 | 32766 | KDR:3894U21 siNA stab07 sense | B AccuGuuuccuGuAuGGAGTT B | 2062 |
| UGACCUUGGAGCAUCUCAUCUGU | 2001 | | KDR:3322L21 siNA (3304C) | AGAuGAGAuGcuccAAGGuTsT | 2064 |
| | | | stab11 antisense | | |
| UUUGAGCAUGGAAGAGGAUUCUG | 2002 | | KDR:3872L21 siNA (3854C) | GAAuccucuuccAuGcucATsT | 2065 |
| | | | stab11 antisense | | |
| UCACCUGUUUCCUGUAUGGAGGA | 2003 | | KDR:3912L21 siNA (3894C) | cuccAuAcAGGAAAcAGGuTsT | 2066 |
| | | | stab11 antisense | | |
| GACAACACAGCAGGAAUCAGUCA | 2004 | | KDR:3966L21 siNA (3948C) | AcuGAuuccuGcuGuGuuGTsT | 2067 |
| | | | stab11 antisense | | |
| UGUCCACUUACCUGAGGAGCAAG | 2017 | 30785 | KDR:3076U21 siNA stab04 sense | B uccAcuuAccuGAGGAGcATT B | 2205 |
| UUUGAGCAUGGAAGAGGAUUCUG | 2002 | 30786 | KDR:3854U21 siNA stab04 sense | B uGAGcAuGGAAGAGGAuucTT B | 2053 |
| AUGGUUCUUGCCUCAGAAGAGCU | 2018 | 30787 | KDR:4089U21 siNA stab04 sense | B GGuucuuGccucAGAAGAGTT B | 2206 |
| UCUGAAGGCUCAAACCAGACAAG | 2019 | 30788 | KDR:4191U21 siNA stab04 sense | B uGAAGGcucAAAccAGAcATT B | 2207 |
| UGUCCACUUACCUGAGGAGCAAG | 2017 | 30789 | KDR:3094L21 siNA (3076C) | uGcuccucAGGuAAGuGGATsT | 2208 |
| | | | stab05 antisense | | |
| UUUGAGCAUGGAAGAGGAUUCUG | 2002 | 30790 | KDR:3872L21 siNA (3854C) | GAAuccucuuccAuGcucATsT | 2057 |
| | | | stab05 antisense | | |
| AUGGUUCUUGCCUCAGAAGAGCU | 2018 | 30791 | KDR:4107L21 siNA (4089C) | cucuucuGAGGcAAGAAccTsT | 2209 |
| | | | stab05 antisense | | |
| UCUGAAGGCUCAAACCAGACAAG | 2019 | 30792 | KDR:4209L21 siNA (4191C) | uGucuGGuuuGAGccuucATsT | 2210 |
| | | | stab05 antisense | | |
| UGUCCACUUACCUGAGGAGCAAG | 2017 | 31426 | KDR:3076U21 siNA sense | UCCACUUACCUGAGGAGCATT | 2211 |
| UUUGAGCAUGGAAGAGGAUUCUG | 2002 | 31435 | KDR:3854U21 siNA sense | UGAGCAUGGAAGAGGAUUCTT | 2045 |
| AUGGUUCUUGCCUCAGAAGAGCU | 2018 | 31428 | KDR:4089U21 siNA sense | GGUUCUUGCCUCAGAAGAGTT | 2212 |
| UCUGAAGGCUCAAACCAGACAAG | 2019 | 31429 | KDR:4191U21 siNA sense | UGAAGGCUCAAACCAGACATT | 2213 |
| UGUCCACUUACCUGAGGAGCAAG | 2017 | 31430 | KDR:3094L21 siNA (3076C) | UGCUCCUCAGGUAAGUGGATT | 2214 |
| | | | antisense | | |
| UUUGAGCAUGGAAGAGGAUUCUG | 2002 | 31439 | KDR:3872L21 siNA (3854C) | GAAUCCUCUUCCAUGCUCATT | 2049 |
| | | | antisense | | |
| AUGGUUCUUGCCUCAGAAGAGCU | 2018 | 31432 | KDR:4107L21 siNA (4089C) | CUCUUCUGAGGCAAGAACCTT | 2215 |
| | | | antisense | | |
| UCUGAAGGCUCAAACCAGACAAG | 2019 | 31433 | KDR:4209L21 siNA (4191C) | UGUCUGGUUUGAGCCUUCATT | 2216 |
| | | | antisense | | |
| UGACCUUGGAGCAUCUCAUCUGU | 2001 | 31434 | KDR:3304U21 siNA sense | ACCUUGGAGCAUCUCAUCUTT | 2044 |
| UCACCUGUUUCCUGUAUGGAGGA | 2003 | 31436 | KDR:3894U21 siNA sense | ACCUGUUUCCUGUAUGGAGTT | 2046 |
| GACAACACAGCAGGAAUCAGUCA | 2004 | 31437 | KDR:3948U21 siNA sense | CAACACAGCAGGAAUCAGUTT | 2047 |
| UGACCUUGGAGCAUCUCAUCUGU | 2001 | 31438 | KDR:3322L21 siNA (3304C) | AGAUGAGAUGCUCCAAGGUTT | 2048 |
| | | | antisense | | |
| UCACCUGUUUCCUGUAUGGAGGA | 2003 | 31440 | KDR:3912L21 siNA (3894C) | CUCCAUACAGGAAACAGGUTT | 2050 |
| | | | antisense | | |
| GACAACACAGCAGGAAUCAGUCA | 2004 | 31441 | KDR:3966L21 siNA (3948C) | ACUGAUUCCUGCUGUGUUGTT | 2051 |
| | | | antisense | | |
| GACAACACAGCAGGAAUCAGUCA | 2004 | 31856 | KDR:3948U21 siNA stab04 sense | B cAAcAcAGcAGGAAucAGuTT B | 2055 |
| GACAACACAGCAGGAAUCAGUCA | 2004 | 31857 | KDR:3966L21 siNA (3948C) | AcuGAuuccuGcuGuGuuGTsT | 2059 |
| | | | stab05 antisense | | |
| UUUGAGCAUGGAAGAGGAUUCUG | 2002 | 31858 | KDR:3854U21 siNA stab07 sense | B uGAGcAuGGAAGAGGAuucTT B | 2061 |
| GACAACAGAGCAGGAAUCAGUCA | 2004 | 31859 | KDR:3948U21 siNA stab07 sense | B cAAcAcAGcAGGAAucAGuTT B | 2063 |
| UUUGAGCAUGGAAGAGGAUUCUG | 2002 | 31860 | KDR:3872L21 siNA (3854C) | GAAuccucuuccAuGcucATsT | 2226 |
| | | | stab08 antisense | | |
| GACAACACAGCAGGAAUCAGUCA | 2004 | 31861 | KDR:3966L21 siNA (3948C) | AcuGAuuccuGcuGuGuuGTsT | 2227 |
| | | | stab08 antisense | | |
| UUUGAGCAUGGAAGAGGAUUCUG | 2002 | 31862 | KDR:3854U21 siNA stab09 sense | B UGAGCAUGGAAGAGGAUUCTT B | 2228 |
| GACAACACAGCAGGAAUCAGUCA | 2004 | 31863 | KDR:3948U21 siNA stab09 sense | B CAACACAGCAGGAAUCAGUTT B | 2229 |
| UUUGAGCAUGGAAGAGGAUUCUG | 2002 | 31864 | KDR:3872L21 siNA (3854C) | GAAUCCUCUUCCAUGCUCATsT | 2230 |
| | | | stab10 antisense | | |
| GACAACACAGCAGGAAUCAGUCA | 2004 | 31865 | KDR:3966L21 siNA (3948C) | ACUGAUUCCUGCUGUGUUGTsT | 2231 |
| | | | stab10 antisense | | |
| UUUGAGCAUGGAAGAGGAUUCUG | 2002 | 31878 | KDR:3854U21 siNA inv | B cuuAGGAGAAGGuAcGAGuTT B | 2232 |
| | | | stab04 sense | | |
| GACAACACAGCAGGAAUCAGUCA | 2004 | 31879 | KDR:3948U21 siNA inv | B uGAcuAAGGAcGAcAcAAcTT B | 2233 |
| | | | stab04 sense | | |
| UUUGAGCAUGGAAGAGGAUUCUG | 2002 | 31880 | KDR:3872L21 siNA (3854C) | AcucGuAccuucuccuAAGTsT | 2234 |
| | | | inv stab05 antisense | | |
| GACAACACAGCAGGAAUCAGUCA | 2004 | 31881 | KDR:3966L21 siNA (3948C) | GuuGuGucGuccuuAGucATsT | 2235 |
| | | | inv stab05 antisense | | |
| UUUGAGCAUGGAAGAGGAUUCUG | 2002 | 31882 | KDR:3854U21 siNA inv stab07 | B cuuAGGAGAAGGuAcGAGuTT B | 2236 |
| | | | sense | | |
| GACAACACAGCAGGAAUCAGUCA | 2004 | 31883 | KDR:3948U21 siNA inv stab07 | B uGAcuAAGGAcGAcAcAAcTT B | 2237 |
| | | | sense | | |
| UUUGAGCAUGGAAGAGGAUUCUG | 2002 | 31884 | KDR:3872L21 siNA (3854C) inv | AcucGuAccuucuccuAAGTsT | 2238 |
| | | | stab08 antisense | | |
| GACAACACAGCAGGAAUCAGUCA | 2004 | 31885 | KDR:3966L21 siNA (3948C) inv | GuuGuGucGuccuuAGucATsT | 2239 |
| | | | stab08 antisense | | |
| UUUGAGCAUGGAAGAGGAUUCUG | 2002 | 31886 | KDR:3854U21 siNA inv stab09 | B CUUAGGAGAAGGUACGAGUTT B | 2240 |
| | | | sense | | |
| GACAACACAGCAGGAAUCAGUCA | 2004 | 31887 | KDR:3948U21 siNA inv stab09 | B UGACUAAGGACGACACAACTT B | 2241 |
| | | | sense | | |
| UUUGAGCAUGGAAGAGGAUUCUG | 2002 | 31888 | KDR:3872L21 siNA (3854C) inv | ACUCGUACCUUCUCCUAAGTsT | 2242 |
| | | | stab10 antisense | | |
| GACAACACAGCAGGAAUCAGUCA | 2004 | 31889 | KDR:3966L21 siNA (3948C) inv | GUUGUGUCGUCCUUAGUCATsT | 2243 |
| | | | stab10 antisense | | |
| CCUUAUGAUGCCAGCAAAU | 2256 | 32238 | KDR:2764U21 siNA sense | CCUUAUGAUGCCAGCAAAUTT | 2365 |
| CUUAUGAUGCCAGCAAAUG | 2257 | 32239 | KDR:2765U21 siNA sense | CUUAUGAUGCCAGCAAAUGTT | 2366 |
| UUAUGAUGCCAGCAAAUGG | 2258 | 32240 | KDR:2766U21 siNA sense | UUAUGAUGCCAGCAAAUGGTT | 2367 |
| UAUGAUGCCAGCAAAUGGG | 2259 | 32241 | KDR:2767U21 siNA sense | UAUGAUGCCAGCAAAUGGGTT | 2368 |
| AUGAUGCCAGCAAAUGGGA | 2260 | 32242 | KDR:2768U21 siNA sense | AUGAUGCCAGCAAAUGGGATT | 2369 |
| CAGACCAUGCUGGACUGCU | 2261 | 32243 | KDR:3712U21 siNA sense | CAGACCAUGCUGGACUGCUTT | 2370 |
| AGACCAUGCUGGACUGCUG | 2262 | 32244 | KDR:3713U21 siNA sense | AGACCAUGCUGGACUGCUGTT | 2371 |
| GACCAUGCUGGACUGCUGG | 2263 | 32245 | KDR:3714U21 siNA sense | GACCAUGCUGGACUGCUGGTT | 2372 |
| ACCAUGCUGGACUGCUGGC | 2264 | 32246 | KDR:3715U21 siNA sense | ACCAUGCUGGACUGCUGGCTT | 2373 |
| CCAUGCUGGACUGCUGGCA | 2265 | 32247 | KDR:3716U21 siNA sense | CCAUGCUGGACUGCUGGCATT | 2374 |
| CAGGAUGGCAAAGACUACA | 2266 | 32248 | KDR:3811U21 siNA sense | CAGGAUGGCAAAGACUACATT | 2375 |
| AGGAUGGCAAAGACUACAU | 2267 | 32249 | KDR:3812U21 siNA sense | AGGAUGGCAAAGACUACAUTT | 2376 |
| CCUUAUGAUGCCAGCAAAU | 2256 | 32253 | KDR:2782L21 siNA (2764C) | AUUUGCUGGCAUCAUAAGGTT | 2377 |
| | | | antisense | | |
| CUUAUGAUGCCAGCAAAUG | 2257 | 32254 | KDR:2783L21 siNA (2765C) | CAUUUGCUGGCAUCAUAAGTT | 2378 |
| | | | antisense | | |
| UUAUGAUGCCAGCAAAUGG | 2258 | 32255 | KDR:2784L21 siNA (2766C) | CCAUUUGCUGGCAUCAUAATT | 2379 |
| | | | antisense | | |
| UAUGAUGCCAGCAAAUGGG | 2259 | 32256 | KDR:2785L21 siNA (2767C) | CCCAUUUGCUGGCAUCAUATT | 2380 |
| | | | antisense | | |
| AUGAUGCCAGCAAAUGGGA | 2260 | 32257 | KDR:2786L21 siNA (2768C) | UCCCAUUUGCUGGCAUCAUTT | 2381 |
| | | | antisense | | |
| CAGACCAUGCUGGACUGCU | 2261 | 32258 | KDR:3730L21 siNA (3712C) | AGCAGUCCAGCAUGGUCUGTT | 2382 |
| | | | antisense | | |
| AGACCAUGCUGGACUGCUG | 2262 | 32259 | KDR:3731L21 siNA (3713C) | CAGCAGUCCAGCAUGGUCUTT | 2383 |
| | | | antisense | | |
| GACCAUGCUGGACUGCUGG | 2263 | 32260 | KDR:3732L21 siNA (3714C) | CCAGCAGUCCAGCAUGGUCTT | 2384 |
| | | | antisense | | |
| ACCAUGCUGGACUGCUGGC | 2264 | 32261 | KDR:3733L21 siNA (3715C) | GCCAGCAGUCCAGCAUGGUTT | 2385 |
| | | | antisense | | |
| CCAUGCUGGACUGCUGGCA | 2265 | 32262 | KDR:3734L21 siNA (3716C) | UGCCAGCAGUCCAGCAUGGTT | 2386 |
| | | | antisense | | |
| CAGGAUGGCAAAGACUACA | 2266 | 32263 | KDR:3829L21 siNA (3811C) | UGUAGUCUUUGCCAUCCUGTT | 2387 |
| | | | antisense | | |
| AGGAUGGCAAAGACUACAU | 2267 | 32264 | KDR:3830L21 siNA (3812C) | AUGUAGUCUUUGCCAUCCUTT | 2388 |
| | | | antisense | | |
| UGACCUUGGAGCAUCUCAUCUGU | 2001 | 32310 | KDR:3304U21 siNA stab09 sense | B ACCUUGGAGCAUCUCAUCUTT B | 2389 |
| UCACCUGUUUCCUGUAUGGAGGA | 2003 | 32311 | KDR:3894U21 siNA stab09 sense | B ACCUGUUUCCUGUAUGGAGTT B | 2390 |
| UGACCUUGGAGCAUCUCAUCUGU | 2001 | 32312 | KDR:3322L21 siNA (3304C) | AGAUGAGAUGCUCCAAGGUTsT | 2391 |
| | | | stab10 antisense | | |
| UCACCUGUUUCCUGUAUGGAGGA | 2003 | 32313 | KDR:3912L21 siNA (3894C) | CUCCAUACAGGAAACAGGUTsT | 2392 |
| | | | stab10 antisense | | |
| UGACCUUGGAGCAUCUCAUCUGU | 2001 | 32314 | KDR:3304U21 siNA inv stab09 | B UCUACUCUACGAGGUUCCATT B | 2393 |
| | | | sense | | |
| UCACCUGUUUCCUGUAUGGAGGA | 2003 | 32315 | KDR:3894U21 siNA inv stab09 | B GAGGUAUGUCCUUUGUCCATT B | 2394 |
| | | | sense | | |
| UGACCUUGGAGCAUCUCAUCUGU | 2001 | 32316 | KDR:3322L21 siNA (3304C) inv | UGGAACCUCGUAGAGUAGATsT | 2395 |
| | | | stab10 antisense | | |
| UCACCUGUUUCCUGUAUGGAGGA | 2003 | 32317 | KDR:3912L21 siNA (3894C) inv | UGGACAAAGGACAUACCUCTsT | 2396 |
| | | | stab10 antisense | | |
| AACAGAAUUUCCUGGGACAGCAA | 2268 | 32762 | KDR:828U21 siNA stab07 sense | B cAGAAuuuccuGGGAcAGcTT B | 2397 |
| UGGAGCAUCUCAUCUGUUACAGC | 2269 | 32763 | KDR:3310U21 siNA stab07 sense | B GAGcAucucAucuGuuAcATT B | 2398 |
| CACGUUUUCAGAGUUGGUGGAAC | 2270 | 32764 | KDR:3758U21 siNA stab07 sense | B cGuuuucAGAGuuGGuGGATT B | 2399 |
| CUCACCUGUUUCCUGUAUGGAGG | 2271 | 32765 | KDR:3893U21 siNA stab07 sense | B cAccuGuuuccuGuAuGGATT B | 2400 |
| AACAGAAUUUCCUGGGACAGCAA | 2268 | 32767 | KDR:846L21 siNA (828C) stab08 | GcuGucccAGGAAAuucuGTsT | 2401 |
| | | | antisense | | |
| UGGAGCAUCUCAUCUGUUACAGC | 2269 | 32768 | KDR:3328L21 siNA (3310C) stab08 | uGuAAcAGAuGAGAuGcucTsT | 2402 |
| | | | antisense | | |
| CACGUUUUCAGAGUUGGUGGAAC | 2270 | 32769 | KDR:3776L21 siNA (3758C) stab08 | uccAccAAcucuGAAAAcGTsT | 2403 |
| | | | antisense | | |
| CUCACCUGUUUCCUGUAUGGAGG | 2271 | 32770 | KDR:3911L21 siNA (3893C) stab08 | uccAuAcAGGAAAcAGGuGTsT | 2404 |
| | | | antisense | | |
| UCACCUGUUUCCUGUAUGGAGGA | 2003 | 32771 | KDR:3912L21 siNA (3894C) stab08 | cuccAuAcAGGAAAcAGGuTsT | 2405 |
| | | | antisense | | |
| AACAGAAUUUCCUGGGACAGCAA | 2268 | 32786 | KDR:828U21 siNA inv stab07 | B cGAcAGGGuccuuuAAGAcTT B | 2406 |
| | | | sense | | |
| UGGAGCAUCUCAUCUGUUACAGC | 2269 | 32787 | KDR:3310U21 siNA inv stab07 | B AcAuuGucuAcucuAcGAGTT B | 2407 |
| | | | sense | | |
| CACGUUUUCAGAGUUGGUGGAAC | 2270 | 32788 | KDR:3758U21 siNA inv stab07 | B AGGuGGuuGAGAcuuuuGcTT B | 2408 |
| | | | sense | | |
| CUCACCUGUUUCCUGUAUGGAGG | 2271 | 32789 | KDR:3893U21 siNA inv stab07 | B AGGuAuGuccuuuGuccAcTT B | 2409 |
| | | | sense | | |
| UCACCUGUUUCCUGUAUGGAGGA | 2003 | 32790 | KDR:3894U21 siNA inv stab07 | B GAGGuAuGuccuuuGuccATT B | 2410 |
| | | | sense | | |
| AACAGAAUUUCCUGGGACAGCAA | 2268 | 32791 | KDR:846L21 siNA (828C) inv | GucuuAAAGGAcccuGucGTsT | 2411 |
| | | | stab08 antisense | | |
| UGGAGCAUCUCAUCUGUUACAGC | 2269 | 32792 | KDR:3328L21 siNA (3310C) inv | cucGuAGAGuAGAcAAuGuTsT | 2412 |
| | | | stab08 antisense | | |
| CACGUUUUCAGAGUUGGUGGAAC | 2270 | 32793 | KDR:3776L21 siNA (3758C) inv | GcAAAAGucucAAccAccuTsT | 2413 |
| | | | stab08 antisense | | |
| CUCACCUGUUUCCUGUAUGGAGG | 2271 | 32794 | KDR:3911L21 siNA (3893C) inv | GuGGAcAAAGGAcAuAccuTsT | 2414 |
| | | | stab08 antisense | | |
| UCACCUGUUUCCUGUAUGGAGGA | 2003 | 32795 | KDR:3912L21 siNA (3894C) inv | uGGAcAAAGGAcAuAccucTsT | 2415 |
| | | | stab08 antisense | | |
| AACAGAAUUUCCUGGGACAGCAA | 2268 | 32958 | KDR:828U21 siNA stab09 sense | B CAGAAUUUCCUGGGACAGCTT B | 2416 |
| UGGAGCAUCUCAUCUGUUACAGC | 2269 | 32959 | KDR:3310U21 siNA stab09 sense | B GAGCAUCUCAUCUGUUACATT B | 2417 |
| CACGUUUUCAGAGUUGGUGGAAC | 2270 | 32960 | KDR:3758U21 siNA stab09 sense | B CGUUUUCAGAGUUGGUGGATT B | 2418 |
| CUCACCUGUUUCCUGUAUGGAGG | 2271 | 32961 | KDR:3893U21 siNA stab09 sense | B CACCUGUUUCCUGUAUGGATT B | 2419 |
| AACAGAAUUUCCUGGGACAGCAA | 2268 | 32963 | KDR:846L21 siNA (828C) stab10 | GCUGUCCCAGGAAAUUCUGTsT | 2420 |
| | | | antisense | | |
| UGGAGCAUCUCAUCUGUUACAGC | 2269 | 32964 | KDR:3328L21 siNA (3310C) stab10 | UGUAACAGAUGAGAUGCUCTsT | 2421 |
| | | | antisense | | |
| CACGUUUUCAGAGUUGGUGGAAC | 2270 | 32965 | KDR:3776L21 siNA (3758C) stab10 | UCCACCAACUCUGAAAACGTsT | 2422 |
| | | | antisense | | |
| CUCACCUGUUUCCUGUAUGGAGG | 2271 | 32966 | KDR:3911L21 siNA (3893C) stab10 | UCCAUACAGGAAACAGGUGTsT | 2423 |
| | | | antisense | | |
| AACAGAAUUUCCUGGGACAGCAA | 2268 | 32988 | KDR:828U21 siNA inv stab09 | B CGACAGGGUCCUUUAAGACTT B | 2424 |
| | | | sense | | |
| UGGAGCAUCUCAUCUGUUACAGC | 2269 | 32989 | KDR:3310U21 siNA inv stab09 | B ACAUUGUCUACUCUACGAGTT B | 2425 |
| | | | sense | | |
| CACGUUUUCAGAGUUGGUGGAAC | 2270 | 32990 | KDR:3758U21 siNA inv stab09 | B AGGUGGUUGAGACUUUUGCTT B | 2426 |
| | | | sense | | |
| CUCACCUGUUUCCUGUAUGGAGG | 2271 | 32991 | KDR:3893U21 siNA inv stab09 | B AGGUAUGUCCUUUGUCCACTT B | 2427 |
| | | | sense | | |
| AACAGAAUUUCCUGGGACAGCAA | 2268 | 32993 | KDR:846L21 siNA (828C) inv | GUCUUAAAGGACCCUGUCGTsT | 2428 |
| | | | stab10 antisense | | |
| UGGAGCAUCUCAUCUGUUACAGC | 2269 | 32994 | KDR:3328L21 siNA (3310C) inv | CUCGUAGAGUAGACAAUGUTsT | 2429 |
| | | | stab10 antisense | | |
| CACGUUUUCAGAGUUGGUGGAAC | 2270 | 32995 | KDR:3776L21 siNA (3758C) inv | GCAAAAGUCUCAACCACCUTsT | 2430 |
| | | | stab10 antisense | | |
| CUCACCUGUUUCCUGUAUGGAGG | 2271 | 32996 | KDR:3911L21 siNA (3893C) inv | GUGGACAAAGGACAUACCUTsT | 2431 |
| | | | stab10 antisense | | |
| UAUGAUGCCAGCAAAUGGG | 2259 | 33727 | KDR:2767U21 siNA stab07 | B uAuGAuGccAGcAAAuGGGTT B | 2494 |
| AUGAUGCCAGCAAAUGGGA | 2260 | 33728 | KDR:2768U21 siNA stab07 | B AuGAuGccAGcAAAuGGGATT B | 2495 |
| ACCAUGCUGGACUGCUGGC | 2264 | 33729 | KDR:3715U21 siNA stab07 | B AccAuGcuGGAcuGcuGGcTT B | 2496 |
| CCAUGCUGGACUGCUGGCA | 2265 | 33730 | KDR:3716U21 siNA stab07 | B ccAuGcuGGAcuGcuGGcATT B | 2497 |
| UAUGAUGCCAGCAAAUGGG | 2259 | 33733 | KDR:2785L21 siNA (2767C) | cccAuuuGcuGGcAucAuATsT | 2498 |
| | | | stab08 | | |
| AUGAUGCCAGCAAAUGGGA | 2260 | 33734 | KDR:2786L21 siNA (2768C) | ucccAuuuGcuGGcAucAuTsT | 2499 |
| | | | stab08 | | |
| ACCAUGCUGGACUGCUGGC | 2264 | 33735 | KDR:3733L21 siNA (3715C) | GccAGcAGuccAGcAuGGuTsT | 2500 |
| | | | stab08 | | |
| CCAUGCUGGACUGCUGGCA | 2265 | 33736 | KDR:3734L21 siNA (3716C) | uGccAGcAGuccAGcAuGGTsT | 2501 |
| | | | stab08 | | |
| UAUGAUGCCAGCAAAUGGG | 2259 | 33739 | KDR:2767U21 siNA stab09 | B UAUGAUGCCAGCAAAUGGGTT B | 2502 |
| AUGAUGCCAGCAAAUGGGA | 2260 | 33740 | KDR:2768U21 siNA stab09 | B AUGAUGCCAGCAAAUGGGATT B | 2503 |
| ACCAUGCUGGACUGCUGGC | 2264 | 33741 | KDR:3715U21 siNA stab09 | B ACCAUGCUGGACUGCUGGCTT B | 2504 |
| CCAUGCUGGACUGCUGGCA | 2265 | 33742 | KDR:3716U21 siNA stab09 | B CCAUGCUGGACUGCUGGCATT B | 2505 |
| UAUGAUGCCAGCAAAUGGG | 2259 | 33745 | KDR:2785L21 siNA (2767C) | CCCAUUUGCUGGCAUCAUATsT | 2506 |
| | | | stab10 | | |
| AUGAUGCCAGCAAAUGGGA | 2260 | 33746 | KDR:2786L21 siNA (2768C) | UCCCAUUUGCUGGCAUCAUTsT | 2507 |
| | | | stab10 | | |
| ACCAUGGUGGACUGCUGGC | 2264 | 33747 | KDR:3733L21 siNA (3715C) | GCCAGCAGUCCAGCAUGGUTsT | 2508 |
| | | | stab10 | | |
| CCAUGCUGGACUGCUGGCA | 2265 | 33748 | KDR:3734L21 siNA (3716C) | UGCCAGCAGUCCAGCAUGGTsT | 2509 |
| | | | stab10 | | |
| UAUGAUGCCAGCAAAUGGG | 2259 | 33751 | KDR:2767U21 siNA inv stab07 | B GGGuAAAcGAccGuAGuAuTT B | 2510 |
| AUGAUGCCAGCAAAUGGGA | 2260 | 33752 | KDR:2768U21 siNA inv stab07 | B AGGGuAAAcGAccGuAGuATT B | 2511 |
| ACCAUGCUGGACUGCUGGC | 2264 | 33753 | KDR:3715U21 siNA inv stab07 | B cGGucGucAGGucGuAccATT B | 2512 |
| CCAUGCUGGACUGCUGGCA | 2265 | 33754 | KDR:3716U21 siNA inv stab07 | B AcGGucGucAGGucGuAccTT B | 2513 |
| UAUGAUGCCAGCAAAUGGG | 2259 | 33757 | KDR:2785L21 siNA (2767C) inv | AuAcuAcGGucGuuuAcccTsT | 2514 |
| | | | stab08 | | |
| AUGAUGCCAGCAAAUGGGA | 2260 | 33758 | KDR:2786L21 siNA (2768C) inv | uAcuAcGGucGuuuAcccuTsT | 2515 |
| | | | stab08 | | |
| ACCAUGCUGGACUGCUGGC | 2264 | 33759 | KDR:3733L21 siNA (3715C) inv | uGGuAcGAccuGAcGAccGTsT | 2516 |
| | | | stab08 | | |
| CCAUGCUGGACUGCUGGCA | 2265 | 33760 | KDR:3734L21 siNA (3716C) inv | GGuAcGAccuGAcGAccGuTsT | 2517 |
| | | | stab08 | | |
| UAUGAUGCCAGCAAAUGGG | 2259 | 33763 | KDR:2767U21 siNA inv stab09 | B GGGUAAACGACCGUAGUAUTT B | 2518 |
| AUGAUGCCAGCAAAUGGGA | 2260 | 33764 | KDR:2768U21 siNA inv stab09 | B AGGGUAAACGACCGUAGUATT B | 2519 |
| ACCAUGCUGGACUGCUGGC | 2264 | 33765 | KDR:3715U21 siNA inv stab09 | B CGGUCGUCAGGUCGUACCATT B | 2520 |
| CCAUGCUGGACUGCUGGCA | 2265 | 33766 | KDR:3716U21 siNA inv stab09 | B ACGGUCGUCAGGUCGUACCTT B | 2521 |
| UAUGAUGCCAGCAAAUGGG | 2259 | 33769 | KDR:2785L21 siNA (2767C) inv | AUACUACGGUCGUUUACCCTsT | 2522 |
| | | | stab10 | | |
| AUGAUGCCAGCAAAUGGGA | 2260 | 33770 | KDR:2786L21 siNA (2768C) inv | UACUACGGUCGUUUACCCUTsT | 2523 |
| | | | stab10 | | |
| ACCAUGCUGGACUGCUGGC | 2264 | 33771 | KDR:3733L21 siNA (3715C) inv | UGGUACGACCUGACGACCGTsT | 2524 |
| | | | stab10 | | |
| CCAUGCUGGACUGCUGGCA | 2265 | 33772 | KDR:3734L21 siNA (3716C) inv | GGUACGACCUGACGACCGUTsT | 2525 |
| | | | stab10 | | |

VEGFR3

| | | | | | |
|---|---|---|---|---|---|
| AGCACUGCCACAAGAAGUACCUG | 2005 | 31904 | FLT4:2011U21 siNA sense | CACUGCCACAAGAAGUACCTT | 2068 |
| CUGAAGCAGAGAGAGAGAAGGCA | 2006 | | FLT4:3921U21 siNA sense | GAAGCAGAGAGAGAGAAGGTT | 2069 |
| AAAGAGGAACCAGGAGGACAAGA | 2007 | | FLT4:4038U21 siNA sense | AGAGGAACCAGGAGGACAATT | 2070 |
| GACAAGAGGAGCAUGAAAGUGGA | 2008 | | FLT4:4054U21 siNA sense | CAAGAGGAGCAUGAAAGUGTT | 2071 |
| AGCACUGCCACAAGAAGUACCUG | 2005 | 31908 | FLT4:2029L21 siNA (2011C) | GGUACUUCUUGUGGCAGUGTT | 2072 |
| | | | antisense | | |
| CUGAAGCAGAGAGAGAGAAGGCA | 2006 | | FLT4:3939L21 siNA (3921C) | CCUUCUCUCUCUCUGCUUCTT | 2073 |
| | | | antisense | | |
| AAAGAGGAACCAGGAGGACAAGA | 2007 | | FLT4:4056L21 siNA (4038C) | UUGUCCUCCUGGUUCCUCUTT | 2074 |
| | | | antisense | | |
| GACAAGAGGAGCAUGAAAGUGGA | 2008 | | FLT4:4072L21 siNA (4054C) | CACUUUCAUGCUCCUCUUGTT | 2075 |
| | | | antisense | | |
| AGCACUGCCACAAGAAGUACCUG | 2005 | | FLT4:2011U21 siNA stab04 | B cAcuGccAcAAGAAGuAccTT B | 2076 |
| | | | sense | | |
| CUGAAGCAGAGAGAGAGAAGGCA | 2006 | | FLT4:3921U21 siNA stab04 | B GAAGcAGAGAGAGAGAAGGTT B | 2077 |
| | | | sense | | |
| AAAGAGGAACCAGGAGGACAAGA | 2007 | | FLT4:4038U21 siNA stab04 | B AGAGGAAccAGGAGGAcAATT B | 2078 |
| | | | sense | | |
| GACAAGAGGAGCAUGAAAGUGGA | 2008 | | FLT4:4054U21 siNA stab04 | B cAAGAGGAGcAuGAAAGuGTT B | 2079 |
| | | | sense | | |
| AGCACUGCCACAAGAAGUACCUG | 2005 | | FLT4:2029L21 siNA (2011C) | GGuAcuucuuGuGGcAGuGTsT | 2080 |
| | | | stab05 antisense | | |
| CUGAAGCAGAGAGAGAGAAGGCA | 2006 | | FLT4:3939L21 siNA (3921C) | ccuucucucucucuGcuucTsT | 2081 |
| | | | stab05 antisense | | |
| AAAGAGGAACCAGGAGGACAAGA | 2007 | | FLT4:4056L21 siNA (4038C) | uuGuccuccuGGuuccucuTsT | 2082 |
| | | | stab05 antisense | | |
| GACAAGAGGAGCAUGAAAGUGGA | 2008 | | FLT4:4072L21 siNA (4054C) | cAcuuucAuGcuccucuuGTsT | 2083 |
| | | | stab05 antisense | | |
| AGCACUGCCACAAGAAGUACCUG | 2005 | | FLT4:2011U21 siNA stab07 | B cAcuGccAcAAGAAGuAccTT B | 2084 |
| | | | sense | | |
| CUGAAGCAGAGAGAGAGAAGGCA | 2006 | | FLT4:3921U21 siNA stab07 | B GAAGcAGAGAGAGAGAAGGTT B | 2085 |
| | | | sense | | |
| AAAGAGGAACCAGGAGGACAAGA | 2007 | | FLT4:4038U21 siNA stab07 | B AGAGGAAccAGGAGGAcAATT B | 2086 |
| | | | sense | | |
| GACAAGAGGAGCAUGAAAGUGGA | 2008 | | FLT4:4054U21 siNA stab07 | B cAAGAGGAGcAuGAAAGuGTT B | 2087 |
| | | | sense | | |
| AGCACUGCCACAAGAAGUACCUG | 2005 | | FLT4:2029L21 siNA (2011C) | GGuAcuucuuGuGGcAGuGTsT | 2088 |
| | | | stab11 antisense | | |
| CUGAAGCAGAGAGAGAGAAGGCA | 2006 | | FLT4:3939L21 siNA (3921C) | ccuucucucucucuGcuucTsT | 2089 |
| | | | stab11 antisense | | |
| AAAGAGGAACCAGGAGGACAAGA | 2007 | | FLT4:4056L21 siNA (4038C) | uuGuccuccuGGuuccucuTsT | 2090 |
| | | | stab11 antisense | | |
| GACAAGAGGAGCAUGAAAGUGGA | 2008 | | FLT4:4072L21 siNA (4054C) | cAcuuucAuGcuccucuuGTsT | 2091 |
| | | | stab11 antisense | | |
| ACUUCUAUGUGACCACCAUCCCC | 2272 | 31902 | FLT4:1666U21 siNA sense | UUCUAUGUGACCACCAUCCTT | 2432 |
| CAAGCACUGCCACAAGAAGUACC | 2273 | 31903 | FLT4:2009U21 siNA sense | AGCACUGCCACAAGAAGUATT | 2433 |
| AGUACGGCAACCUCUCCAACUUC | 2274 | 31905 | FLT4:2815U21 siNA sense | UACGGCAACCUCUCCAACUTT | 2434 |
| ACUUCUAUGUGACCACCAUCCCC | 2272 | 31906 | FLT4:1684L21 siNA (1666C) | GGAUGGUGGUCACAUAGAATT | 2435 |
| | | | antisense | | |
| CAAGCACUGCCACAAGAAGUACC | 2273 | 31907 | FLT4:2027L21 siNA (2009C) | UACUUCUUGUGGCAGUGCUTT | 2436 |
| | | | antisense | | |
| AGUACGGCAACCUCUCCAACUUC | 2274 | 31909 | FLT4:2833L21 siNA (2815C) | AGUUGGAGAGGUUGCCGUATT | 2437 |
| | | | antisense | | |
| CUGCCAUGUACAAGUGUGUGGUC | 2440 | 34383 | FLT4:1609U21 siNA stab09 | B GCCAUGUACAAGUGUGUGGTT B | 2526 |
| ACUUCUAUGUGACCACCAUCCCC | 2272 | 34384 | FLT4:1666U21 siNA stab09 | B UUCUAUGUGACCACCAUCCTT B | 2527 |
| CAAGCACUGCCACAAGAAGUACC | 2273 | 34385 | FLT4:2009U21 siNA stab09 | B AGCACUGCCACAAGAAGUATT B | 2528 |
| AGCACUGCCACAAGAAGUACCUG | 2005 | 34386 | FLT4:2011U21 siNA stab09 | B CACUGCCACAAGAAGUACCTT B | 2529 |
| ACUGCCACAAGAAGUACCUGUCG | 2441 | 34387 | FLT4:2014U21 siNA stab09 | B UGCCACAAGAAGUACCUGUTT B | 2530 |
| AGUACGGCAACCUCUCCAACUUC | 2274 | 34388 | FLT4:2815U21 siNA stab09 | B UACGGCAACCUCUCCAACUTT B | 2531 |
| UGGUGAAGAUCUGUGACUUUGGC | 2442 | 34389 | FLT4:3172U21 siNA stab09 | B GUGAAGAUCUGUGACUUUGTT B | 2532 |
| GAAGAUCUGUGACUUUGGCCUUG | 2443 | 34390 | FLT4:3176U21 siNA stab09 | B AGAUCUGUGACUUUGGCCUTT B | 2533 |
| CUGCCAUGUACAAGUGUGUGGUC | 2440 | 34391 | FLT4:1627L21 siNA (1609C) | CCACACACUUGUACAUGGCTsT | 2534 |
| | | | stab10 | | |
| ACUUCUAUGUGACCACCAUCCCC | 2272 | 34392 | FLT4:1684L21 siNA (1666C) | GGAUGGUGGUCACAUAGAATsT | 2535 |
| | | | stab10 | | |
| CAAGCACUGCCACAAGAAGUACC | 2273 | 34393 | FLT4:2027L21 siNA (2009C) | UACUUCUUGUGGCAGUGCUTsT | 2536 |
| | | | stab10 | | |
| AGCACUGCCACAAGAAGUACCUG | 2005 | 34394 | FLT4:2029L21 siNA (2011C) | GGUACUUCUUGUGGCAGUGTsT | 2537 |
| | | | stab10 | | |
| ACUGCCACAAGAAGUACCUGUCG | 2441 | 34395 | FLT4:2032L21 siNA (2014C) | ACAGGUACUUCUUGUGGCATsT | 2538 |
| | | | stab10 | | |
| AGUACGGCAACCUCUCCAACUUC | 2274 | 34396 | FLT4:2833L21 siNA (2815C) | AGUUGGAGAGGUUGCCGUATsT | 2539 |
| | | | stab10 | | |
| UGGUGAAGAUCUGUGACUUUGGC | 2442 | 34397 | FLT4:3190L21 siNA (3172C) | CAAAGUCACAGAUCUUCACTsT | 2540 |
| | | | stab10 | | |
| GAAGAUCUGUGACUUUGGCCUUG | 2443 | 34398 | FLT4:3194L21 siNA (3176C) | AGGCCAAAGUCACAGAUCUTsT | 2541 |
| | | | stab10 | | |
| CUGCCAUGUACAAGUGUGUGGUC | 2440 | 34399 | FLT4:1627L21 siNA (1609C) | ccAcAcAcuuGuAcAuGGcTsT | 2542 |
| | | | stab08 | | |
| ACUUCUAUGUGACCACCAUCCCC | 2272 | 34400 | FLT4:1684L21 siNA (1666C) | GGAuGGuGGucAcAuAGAATsT | 2543 |
| | | | stab08 | | |
| CAAGCACUGCCACAAGAAGUACC | 2273 | 34401 | FLT4:2027L21 siNA (2009C) | uAcuucuuGuGGcAGuGcuTsT | 2544 |
| | | | stab08 | | |
| AGCACUGCCACAAGAAGUACCUG | 2005 | 34402 | FLT4:2029L21 siNA (2011C) | GGuAcuucuuGuGGcAGuGTsT | 2545 |
| | | | stab08 | | |
| ACUGCCACAAGAAGUACCUGUCG | 2441 | 34403 | FLT4:2032L21 siNA (2014C) | AcAGGuAcuucuuGuGGcATsT | 2546 |
| | | | stab08 | | |
| AGUACGGCAACCUCUCCAACUUC | 2274 | 34404 | FLT4:2833L21 siNA (2815C) | AGuuGGAGAGGuuGccGuATsT | 2547 |
| | | | stab08 | | |
| UGGUGAAGAUCUGUGACUUUGGC | 2442 | 34405 | FLT4:3190L21 siNA (3172C) | cAAAGucAcAGAucuucAcTsT | 2548 |
| | | | stab08 | | |
| GAAGAUCUGUGACUUUGGCCUUG | 2443 | 34406 | FLT4:3194L21 siNA (3176C) | AGGccAAAGucAcAGAucuTsT | 2549 |
| | | | stab08 | | |

VEGFR1 and VEGFR2 homologous sequences

| | | | | | |
|---|---|---|---|---|---|
| CAUGCUGGACUGCUGGCAC | 2244 | 32235 | FLT1:3645U21 siNA | CAUGCUGGACUGCUGGCACTT | 2275 |
| AUGCUGGACUGCUGGCACA | 2245 | 32236 | FLT1:3646U21 siNA | AUGCUGGACUGCUGGCACATT | 2276 |
| UGCUGGACUGCUGGCACAG | 2246 | 32237 | FLT1:3647U21 siNA | UGCUGGACUGCUGGCACAGTT | 2277 |
| CAUGCUGGACUGCUGGCAC | 2244 | 32250 | FLT1:3663L21 siNA (3645C) | GUGCCAGCAGUCCAGCAUGTT | 2278 |
| AUGCUGGACUGCUGGCACA | 2245 | 32251 | FLT1:3664L21 siNA (3646C) | UGUGCCAGCAGUCCAGCAUTT | 2279 |
| UGCUGGACUGCUGGCACAG | 2246 | 32252 | FLT1:3665L21 siNA (3647C) | CUGUGCCAGCAGUCCAGCATT | 2280 |
| CCUUAUGAUGCCAGCAAAU | 2256 | 32238 | KDR:2764U21 siNA | CCUUAUGAUGCCAGCAAAUTT | 2365 |
| CUUAUGAUGCCAGCAAAUG | 2257 | 32239 | KDR:2765U21 siNA | CUUAUGAUGCCAGCAAAUGTT | 2366 |
| UUAUGAUGCCAGCAAAUGG | 2258 | 32240 | KDR:2766U21 siNA | UUAUGAUGCCAGCAAAUGGTT | 2367 |
| UAUGAUGCCAGCAAAUGGG | 2259 | 32241 | KDR:2767U21 siNA | UAUGAUGCCAGCAAAUGGGTT | 2368 |
| AUGAUGCCAGCAAAUGGGA | 2260 | 32242 | KDR:2768U21 siNA | AUGAUGCCAGCAAAUGGGATT | 2369 |
| CAGACCAUGCUGGACUGCU | 2261 | 32243 | KDR:3712U21 siNA | CAGACCAUGCUGGACUGCUTT | 2370 |
| AGACCAUGCUGGACUGCUG | 2262 | 32244 | KDR:3713U21 siNA | AGACCAUGCUGGACUGCUGTT | 2371 |
| GACCAUGCUGGACUGCUGG | 2263 | 32245 | KDR:3714U21 siNA | GACCAUGCUGGACUGCUGGTT | 2372 |
| ACCAUGCUGGACUGCUGGC | 2264 | 32246 | KDR:3715U21 siNA | ACCAUGCUGGACUGCUGGCTT | 2373 |
| CCAUGCUGGACUGCUGGCA | 2265 | 32247 | KDR:3716U21 siNA | CCAUGCUGGACUGCUGGCATT | 2374 |
| CAGGAUGGCAAAGACUACA | 2266 | 32248 | KDR:3811U21 siNA | CAGGAUGGCAAAGACUACATT | 2375 |
| AGGAUGGCAAAGACUACAU | 2267 | 32249 | KDR:3812U21 siNA | AGGAUGGCAAAGACUACAUTT | 2376 |
| CCUUAUGAUGCCAGCAAAU | 2256 | 32253 | KDR:2782L21 siNA (2764C) | AUUUGCUGGCAUCAUAAGGTT | 2377 |
| CUUAUGAUGCCAGCAAAUG | 2257 | 32254 | KDR:2783L21 siNA (2765C) | CAUUUGCUGGCAUCAUAAGTT | 2378 |
| UUAUGAUGCCAGCAAAUGG | 2258 | 32255 | KDR:2784L21 siNA (2766C) | CCAUUUGCUGGCAUCAUAATT | 2379 |
| UAUGAUGCCAGCAAAUGGG | 2259 | 32256 | KDR:2785L21 siNA (2767C) | CCCAUUUGCUGGCAUCAUATT | 2380 |
| AUGAUGCCAGCAAAUGGGA | 2260 | 32257 | KDR:2786L21 siNA (2768C) | UCCCAUUUGCUGGCAUCAUTT | 2381 |
| CAGACCAUGCUGGACUGCU | 2261 | 32258 | KDR:3730L21 siNA (3712C) | AGCAGUCCAGCAUGGUCUGTT | 2382 |
| AGACCAUGCUGGACUGCUG | 2262 | 32259 | KDR:3731L21 siNA (3713C) | CAGCAGUCCAGCAUGGUCUTT | 2383 |
| GACCAUGCUGGACUGCUGG | 2263 | 32260 | KDR:3732L21 siNA (3714C) | CCAGCAGUCCAGCAUGGUCTT | 2384 |
| ACCAUGCUGGACUGCUGGC | 2264 | 32261 | KDR:3733L21 siNA (3715C) | GCCAGCAGUCCAGCAUGGUTT | 2385 |
| CCAUGCUGGACUGCUGGCA | 2265 | 32262 | KDR:3734L21 siNA (3716C) | UGCCAGCAGUCCAGCAUGGTT | 2386 |
| CAGGAUGGCAAAGACUACA | 2266 | 32263 | KDR:3829L21 siNA (3811C) | UGUAGUCUUUGCCAUCCUGTT | 2387 |
| AGGAUGGCAAAGACUACAU | 2267 | 32264 | KDR:3830L21 siNA (3812C) | AUGUAGUCUUUGCCAUCCUTT | 2388 |
| CAUGCUGGACUGCUGGCAC | 2244 | 33725 | FLT1:3645U21 siNA stab07 | B cAuGcuGGAcuGcuGGcAcTT B | 2449 |
| AUGCUGGACUGCUGGCACA | 2245 | 33726 | FLT1:3646U21 siNA stab07 | B AuGcuGGAcuGcuGGcAcATT B | 2450 |
| CAUGCUGGACUGCUGGCAC | 2244 | 33731 | FLT1:3663L21 siNA (3645C) | GuGccAGcAGuccAGcAuGTsT | 2451 |
| | | | stab08 | | |
| AUGCUGGACUGCUGGCACA | 2245 | 33732 | FLT1:3664L21 siNA (3646C) | uGuGccAGcAGuccAGcAuTsT | 2452 |
| | | | stab08 | | |
| CAUGCUGGACUGCUGGCAC | 2244 | 33737 | FLT1:3645U21 siNA stab09 | B CAUGCUGGACUGCUGGCACTT B | 2453 |
| AUGCUGGACUGCUGGCACA | 2245 | 33738 | FLT1:3646U21 siNA stab09 | B AUGCUGGACUGCUGGCACATT B | 2454 |
| CAUGCUGGACUGCUGGCAC | 2244 | 33743 | FLT1:3663L21 siNA (3645C) | GUGCCAGCAGUCCAGCAUGTsT | 2455 |
| | | | stab10 | | |
| AUGCUGGACUGCUGGCACA | 2245 | 33744 | FLT1:3664L21 siNA (3646C) | UGUGCCAGCAGUCCAGCAUTsT | 2456 |
| | | | stab10 | | |
| CAUGCUGGACUGCUGGCAC | 2244 | 33749 | FLT1:3645U21 siNA inv stab07 | B cAcGGucGucAGGucGuAcTT B | 2457 |
| AUGCUGGACUGCUGGCACA | 224 | 5 33750 | FLT1:3646U21 siNA inv stab07 | B AcAcGGucGucAGGucGuATT B | 2458 |
| CAUGCUGGACUGCUGGCAC | 2244 | 33755 | FLT1:3663L21 siNA (3645C) inv | GuAcGAccuGAcGAccGuGTsT | 2459 |
| | | | stab08 | | |
| AUGCUGGACUGCUGGCACA | 2245 | 33756 | FLT1:3664L21 siNA (3646C) inv | uAcGAccuGAcGAccGuGuTsT | 2460 |
| | | | stab08 | | |
| CAUGCUGGACUGCUGGCAC | 2244 | 33761 | FLT1:3645U21 siNA inv stab09 | B CACGGUCGUCAGGUCGUACTT B | 2461 |
| AUGCUGGACUGCUGGCACA | 2245 | 33762 | FLT1:3646U21 siNA inv stab09 | B ACACGGUCGUCAGGUCGUATT B | 2462 |
| CAUGCUGGACUGCUGGCAC | 2244 | 33767 | FLT1:3663L21 siNA (3645C) inv | GUACGACCUGACGACCGUGTsT | 2463 |
| | | | stab10 | | |
| AUGCUGGACUGCUGGCACA | 2245 | 33768 | FLT1:3664L21 siNA (3646C) inv | UACGACCUGACGACCGUGUTsT | 2464 |
| | | | stab10 | | |
| UAUGAUGCCAGCAAAUGGG | 2259 | 33727 | KDR:2767U21 siNA stab07 | B uAuGAuGccAGcAAAuGGGTT B | 2494 |
| AUGAUGCCAGCAAAUGGGA | 2260 | 33728 | KDR:2768U21 siNA stab07 | B AuGAuGccAGcAAAuGGGATT B | 2495 |
| ACCAUGCUGGACUGCUGGC | 2264 | 33729 | KDR:3715U21 siNA stab07 | B AccAuGcuGGAcuGcuGGcTT B | 2496 |
| CCAUGCUGGACUGCUGGCA | 2265 | 33730 | KDR:3716U21 siNA stab07 | B ccAuGcuGGAcuGcuGGcATT B | 2497 |
| UAUGAUGCCAGCAAAUGGG | 2259 | 33733 | KDR:2785L21 siNA (2767C) | cccAuuuGcuGGcAucAuATsT | 2498 |
| | | | stab08 | | |
| AUGAUGCCAGCAAAUGGGA | 2260 | 33734 | KDR:2786L21 siNA (2768C) | ucccAuuuGcuGGcAucAuTsT | 2499 |
| | | | stab08 | | |
| ACCAUGCUGGACUGCUGGC | 2264 | 33735 | KDR:3733L21 siNA (3715C) | GccAGcAGuccAGcAuGGuTsT | 2500 |
| | | | stab08 | | |
| CCAUGCUGGACUGCUGGCA | 2265 | 33736 | KDR:3734L21 siNA (3716C) | uGcCAGcAGuccAGcAuGGTsT | 2501 |
| | | | stab08 | | |
| UAUGAUGCCAGCAAAUGGG | 2259 | 33739 | KDR:2767U21 siNA stab09 | B UAUGAUGCCAGCAAAUGGGTT B | 2502 |
| AUGAUGCCAGCAAAUGGGA | 2260 | 33740 | KDR:2768U21 siNA stab09 | B AUGAUGCCAGCAAAUGGGATT B | 2503 |
| ACCAUGCUGGACUGCUGGC | 2264 | 33741 | KDR:3715U21 siNA stab09 | B ACCAUGCUGGACUGCUGGCTT B | 2504 |
| CCAUGCUGGACUGCUGGCA | 2265 | 33742 | KDR:3716U21 siNA stab09 | B CCAUGCUGGACUGCUGGCATT B | 2505 |
| UAUGAUGCCAGCAAAUGGG | 2259 | 33745 | KDR:2785L21 siNA (2767C) | CCCAUUUGCUGGCAUCAUATsT | 2506 |
| | | | stab10 | | |
| AUGAUGCCAGCAAAUGGGA | 2260 | 33746 | KDR:2786L21 siNA (2768C) | UCCCAUUUGCUGGCAUCAUTsT | 2507 |
| | | | stab10 | | |
| ACCAUGCUGGACUGCUGGC | 2264 | 33747 | KDR:3733L21 siNA (3715C) | GCCAGCAGUCCAGCAUGGUTsT | 2508 |
| | | | stab10 | | |
| CCAUGCUGGACUGCUGGCA | 2265 | 33748 | KDR:3734L21 siNA (3716C) | UGCCAGCAGUCCAGCAUGGTsT | 2509 |
| | | | stab10 | | |
| UAUGAUGCCAGCAAAUGGG | 2259 | 33751 | KDR:2767U21 siNA inv stab07 | B GGGuAAAcGAccGuAGuAuTT B | 2510 |
| AUGAUGCCAGCAAAUGGGA | 2260 | 33752 | KDR:2768U21 siNA inv stab07 | B AGGGuAAAcGAccGuAGuATT B | 2511 |
| ACCAUGCUGGACUGCUGGC | 2264 | 33753 | KDR:3715U21 siNA inv stab07 | B cGGucGucAGGucGuAccATT B | 2512 |
| CCAUGCUGGACUGCUGGCA | 2265 | 33754 | KDR:3716U21 siNA inv stab07 | B AcGGucGucAGGucGuAccTT B | 2513 |
| UAUGAUGCCAGCAAAUGGG | 2259 | 33757 | KDR:2785L21 siNA (2767C) inv | AuAcuAcGGucGuuuAcccTsT | 2514 |
| | | | stab08 | | |
| AUGAUGCCAGCAAAUGGGA | 2260 | 33758 | KDR:2786L21 siNA (2768C) inv | uAcuAcGGucGuuuAcccuTsT | 2515 |
| | | | stab08 | | |
| ACCAUGCUGGACUGCUGGC | 2264 | 33759 | KDR:3733L21 siNA (3715C) inv | uGGuAcGAccuGAcGAccGTsT | 2516 |
| | | | stab08 | | |
| CCAUGCUGGACUGCUGGCA | 2265 | 33760 | KDR:3734L21 siNA (3716C) inv | GGuAcGAccuGAcGAccGuTsT | 2517 |
| | | | stab08 | | |
| UAUGAUGCCAGCAAAUGGG | 2259 | 33763 | KDR:2767U21 siNA inv stab09 | B GGGUAAACGACCGUAGUAUTT B | 2518 |
| AUGAUGCCAGCAAAUGGGA | 2260 | 33764 | KDR:2768U21 siNA inv stab09 | B AGGGUAAACGACCGUAGUATT B | 2519 |
| ACCAUGCUGGACUGCUGGC | 2264 | 33765 | KDR:3715U21 siNA inv stab09 | B CGGUCGUCAGGUCGUACCATT B | 2520 |
| CCAUGCUGGACUGCUGGCA | 2265 | 33766 | KDR:3716U21 siNA inv stab09 | B ACGGUCGUCAGGUCGUACCTT B | 2521 |
| UAUGAUGCCAGCAAAUGGG | 2259 | 33769 | KDR:2785L21 siNA (2767C) inv | AUACUACGGUCGUUUACCCTsT | 2522 |
| | | | stab10 | | |
| AUGAUGCCAGCAAAUGGGA | 2260 | 33770 | KDR:2786L21 siNA (2768C) inv | UACUACGGUCGUUUACCCUTsT | 2523 |
| | | | stab10 | | |
| ACCAUGCUGGACUGCUGGC | 2264 | 33771 | KDR:3733L21 siNA (3715C) inv | UGGUACGACCUGACGACCGTsT | 2524 |
| | | | stab10 | | |
| CCAUGCUGGACUGCUGGCA | 2265 | 33772 | KDR:3734L21 siNA (3716C) inv | GGUACGACCUGACGACCGUTsT | 2525 |
| | | | stab10 | | |

Uppercase = ribonucleotide
u,c = 2′-deoxy-2′-fluoro U,C
T = thymidine
B = inverted deoxy abasic
s = phosphorothioate linkage
A = deoxy Adenosine
G = deoxy Guanosine
A = 2′-O-methyl Adenosine
G = 2′-O-methyl Guanosine
X = nitroindole universal base
Z = nitropyrole universal base
Y = 3′,3′-inverted thymidine
M = glyceryl
N = 3′-O-methyl uridine
P = L-thymidine
Q = L-uridine
R = 5-bromo-deoxy-uridine
Z = sbL: symmetrical
bifunctional linker
H = cho12: capped Cholesterol
TEG
L = C18 phospholipid

[0491] Sequence alignments between select Human (h),
Rat (r), and Mouse (m) VEGFr1 (FLT1) and
VEGFr2 (KDR) 23mer target sequences

| | | | |
|---|---|---|---|
| Gene | Pos | Sequence | SEQ ID |

| | | |
|---|---|---|
| hFLT1 | 3645 | AUCAUGCUGGACUGCUGGCACAG |
| hKDR | 3717 | AcCAUGCUGGACUGCUGGCACgG |
| mFLT1 | 3422 | AUCAUGUUGGAUUGCUGGCACAa |
| mKDR | 3615 | AcCAUGCUGGACUGCUGGCAUga |
| rFLT1 | 3632 | AUCAUGCUGGAUUGCUGGCACAa |
| rKDR | 3650 | AcCAUGCUGGAUUGCUGGCAUga |
| hFLT1 | 3646 | UCAUGCUGGACUGCUGGCACAGA |
| hKDR | 3718 | cCAUGCUGGACUGCUGGCACgGg |
| mFLT1 | 3423 | UCAUGUUGGAUUGCUGGCACAaA |
| mKDR | 3616 | cCAUGCUGGACUGCUGGCAUgag |
| rFLT1 | 3633 | UCAUGCUGGAUUGCUGGCACAaA |
| rKDR | 3651 | cCAUGCUGGAUUGCUGGCAUgag |
| hFLT1 | 3647 | CAUGCUGGACUGCUGGCACAGAG |
| hKDR | 3719 | CAUGCUGGACUGCUGGCACgGgG |
| mFLT1 | 3424 | CAUGUUGGAUUGCUGGCACAaAG |
| mKDR | 3617 | CAUGCUGGACUGCUGGCAUgagG |
| rFLT1 | 3634 | CAUGCUGGAUUGCUGGCACAaAG |
| rKDR | 3652 | CAUGCUGGAUUGCUGGCAUgagG |
| hKDR | 2764 | UGCCUUAUGAUGCCAGCAAAUGG |
| hFLT1 | 2689 | UcCCUUAUGAUGCCAGCAAgUGG |
| mFLT1 | 2469 | UGCCcUAUGAUGCCAGCAAgUGG |
| mKDR | 2662 | UGCCUUAUGAUGCCAGCAAgUGG |
| rFLT1 | 2676 | UGCCcUAUGAUGCCAGCAAgUGG |
| rKDR | 2697 | UGCCUUAUGAUGCCAGCAAgUGG |
| hKDR | 2765 | GCCUUAUGAUGCCAGCAAAUGGG |
| hFLT1 | 2690 | cCCUUAUGAUGCCAGCAAgUGGG |
| mFLT1 | 2470 | GCCcUAUGAUGCCAGCAAgUGGG |
| mKDR | 2663 | GCCUUAUGAUGCCAGCAAgUGGG |
| rFLT1 | 2677 | GCCcUAUGAUGCCAGCAAgUGGG |
| rKDR | 2698 | GCCUUAUGAUGCCAGCAAgUGGG |
| hKDR | 2766 | CCUUAUGAUGCCAGCAAAUGGGA |
| hFLT1 | 2691 | CCUUAUGAUGCCAGCAAgUGGGA |
| mFLT1 | 2471 | CCcUAUGAUGCCAGCAAgUGGGA |
| mKDR | 2664 | CCUUAUGAUGCCAGCAAgUGGGA |
| rFLT1 | 2678 | CCcUAUGAUGCCAGCAAgUGGGA |
| rKDR | 2699 | CCUUAUGAUGCCAGCAAgUGGGA |
| hKDR | 2767 | CUUAUGAUGCCAGCAAAUGGGAA |
| hFLT1 | 2692 | CUUAUGAUGCCAGCAAgUGGGAg |
| mFLT1 | 2472 | CcUAUGAUGCCAGCAAgUGGGAg |
| mKDR | 2665 | CUUAUGAUGCCAGCAAgUGGGAA |
| rFLT1 | 2679 | CcUAUGAUGCCAGCAAgUGGGAg |
| rKDR | 2700 | CUUAUGAUGCCAGCAAgUGGGAg |
| hKDR | 2768 | UUAUGAUGCCAGCAAAUGGGAAU |
| hFLT1 | 2693 | UUAUGAUGCCAGCAAgUGGGAgU |
| mFLT1 | 2473 | cUAUGAUGCCAGCAAgUGGGAgU |
| mKDR | 2666 | UUAUGAUGCCAGCAAgUGGGAAU |
| rFLT1 | 2680 | cUAUGAUGCCAGCAAgUGGGAgU |
| rKDR | 2701 | UUAUGAUGCCAGCAAgUGGGAgU |
| hKDR | 3712 | ACCAGACCAUGCUGGACUGCUGG |
| hFLT1 | 3640 | AUCAGAUCAUGCUGGACUGCUGG |
| mFLT1 | 3417 | ACCAaAUCAUGUUGGAUUGCUGG |
| mKDR | 3610 | ACCAGACCAUGCUGGACUGCUGG |
| rFLT1 | 3627 | ACCAaAUCAUGCUGGAUUGCUGG |
| rKDR | 3645 | ACCAaACCAUGCUGGAUUGCUGG |
| hKDR | 3713 | CCAGACCAUGCUGGACUGCUGGC |
| hFLT1 | 3641 | UCAGAUCAUGCUGGACUGCUGGC |
| mFLT1 | 3418 | CCAaAUCAUGUUGGAUUGCUGGC |
| mKDR | 3611 | CCAGACCAUGCUGGACUGCUGGC |
| rFLT1 | 3628 | CCAaAUCAUGCUGGAUUGCUGGC |
| rKDR | 3646 | CCAaACCAUGCUGGAUUGCUGGC |
| hKDR | 3714 | CAGACCAUGCUGGACUGCUGGCA |
| hFLT1 | 3642 | CAGAUCAUGCUGGACUGCUGGCA |
| mFLT1 | 3419 | CAaAUCAUGUUGGAUUGCUGGCA |
| mKDR | 3612 | CAGACCAUGCUGGACUGCUGGCA |
| rFLT1 | 3629 | CAaAUCAUGCUGGAUUGCUGGCA |
| rKDR | 3647 | CAaACCAUGCUGGAUUGCUGGCA |
| hKDR | 3715 | AGACCAUGCUGGACUGCUGGCAC |
| hFLT1 | 3643 | AGAUCAUGCUGGACUGCUGGCAC |
| mFLT1 | 3420 | AaAUCAUGUUGGAUUGCUGGCAC |
| mKDR | 3613 | AGACCAUGCUGGACUGCUGGCAU |
| rFLT1 | 3630 | AaAUCAUGCUGGAUUGCUGGCAC |
| rKDR | 3648 | AaACCAUGCUGGAUUGCUGGCAU |
| hKDR | 3716 | GACCAUGCUGGACUGCUGGCACG |
| hFLT1 | 3644 | GAUCAUGCUGGACUGCUGGCACa |
| mFLT1 | 3421 | aAUCAUGUUGGAUUGCUGGCACa |
| mKDR | 3614 | GACCAUGCUGGACUGCUGGCAUG |
| rFLT1 | 3631 | aAUCAUGCUGGAUUGCUGGCACa |
| rKDR | 3649 | aACCAUGCUGGAUUGCUGGCAUG |
| hKDR | 3811 | AGCAGGAUGGCAAAGACUACAUU |
| hFLT1 | 3739 | AaCAGGAUGGUAAAGACUACAUc |
| mFLT1 | 3516 | AaCAGGAUGGgAAAGAUUACAUc |
| mKDR | 3709 | AGCAGGAUGGCAAAGACUAUAUU |
| rFLT1 | 3726 | AaCAGGAUGGUAAAGACUACAUc |
| rKDR | 3744 | AGCAGGAUGGCAAAGACUAUAUU |
| hKDR | 3812 | GCAGGAUGGCAAAGACUACAUUG |
| hFLT1 | 3740 | aCAGGAUGGUAAAGACUACAUcc |
| mFLT1 | 3517 | aCAGGAUGGgAAAGAUUACAUcc |
| mKDR | 3710 | GCAGGAUGGCAAAGACUAUAUUG |
| rFLT1 | 3727 | aCAGGAUGGUAAAGACUACAUcc |
| rKDR | 3745 | GCAGGAUGGCAAAGACUAUAUUG |

Lower case nucleotides represent mismatches

[0492] Sequence alignments between select Human (h),
Rat (r), and Mouse (m) VEGFr1 (FLT1) and
VEGFr2 (KDR) 19mer target sequences

| | | | |
|---|---|---|---|
| Gene | Pos | Seq | SEQ ID |

| | | |
|---|---|---|
| hFLT1 | 3645 | CAUGCUGGACUGCUGGCAC |
| hKDR | 3717 | CAUGCUGGACUGCUGGCAC |
| mFLT1 | 3422 | CAUGuUGGAuUGCUGGCAC |
| mKDR | 3615 | CAUGCUGGACUGCUGGCAu |
| rFLT1 | 3632 | CAUGCUGGAuUGCUGGCAC |
| rKDR | 3650 | CAUGCUGGAuUGCUGGCAu |
| hFLT1 | 3646 | AUGCUGGACUGCUGGCACA |
| hKDR | 3718 | AUGCUGGACUGCUGGCACg |
| mFLT1 | 3423 | AUGuUGGAuUGCUGGCACA |
| mKDR | 3616 | AUGCUGGACUGCUGGCAug |
| rFLT1 | 3633 | AUGCUGGAuUGCUGGCACA |
| rKDR | 3651 | AUGCUGGAuUGCUGGCAug |
| hFLT1 | 3647 | UGCUGGACUGCUGGCACAG |
| hKDR | 3719 | UGCUGGACUGCUGGCACgG |
| mFLT1 | 3424 | UGuUGGAuUGCUGGCACAa |
| mKDR | 3617 | UGCUGGACUGCUGGCAuga |
| rFLT1 | 3634 | UGCUGGAuUGCUGGCACAa |
| rKDR | 3652 | UGCUGGAuUGCUGGCAuga |
| hKDR | 2764 | CCUUAUGAUGCCAGCAAAU |
| hFLT1 | 2689 | CCUUAUGAUGCCAGCAAgU |
| mFLT1 | 2469 | CCcUAUGAUGCCAGCAAgU |
| mKDR | 2662 | CCUUAUGAUGCCAGCAAgU |
| rFLT1 | 2676 | CCcUAUGAUGCCAGCAAgU |
| rKDR | 2697 | CCUUAUGAUGCCAGCAAgU |
| hKDR | 2765 | CUUAUGAUGCCAGCAAAUG |
| hFLT1 | 2690 | CUUAUGAUGCCAGCAAgUG |
| mFLT1 | 2470 | CcUAUGAUGCCAGCAAgUG |
| mKDR | 2663 | CUUAUGAUGCCAGCAAgUG |
| rFLT1 | 2677 | CcUAUGAUGCCAGCAAgUG |
| rKDR | 2698 | CUUAUGAUGCCAGCAAgUG |
| hKDR | 2766 | UUAUGAUGCCAGCAAAUGG |
| hFLT1 | 2691 | UUAUGAUGCCAGCAAgUGG |
| mFLT1 | 2471 | cUAUGAUGCCAGCAAgUGG |
| mKDR | 2664 | UUAUGAUGCCAGCAAgUGG |
| rFLT1 | 2678 | cUAUGAUGCCAGCAAgUGG |
| rKDR | 2699 | UUAUGAUGCCAGCAAgUGG |
| hKDR | 2767 | UAUGAUGCCAGCAAAUGGG |
| hFLT1 | 2692 | UAUGAUGCCAGCAAgUGGG |
| mFLT1 | 2472 | UAUGAUGCCAGCAAgUGGG |
| mKDR | 2665 | UAUGAUGCCAGCAAgUGGG |
| rFLT1 | 2679 | UAUGAUGCCAGCAAgUGGG |
| rKDR | 2700 | UAUGAUGCCAGCAAgUGGG |
| hKDR | 2768 | AUGAUGCCAGCAAAUGGGA |
| hFLT1 | 2693 | AUGAUGCCAGCAAgUGGGA |
| mFLT1 | 2473 | AUGAUGCCAGCAAgUGGGA |
| mKDR | 2666 | AUGAUGCCAGCAAgUGGGA |
| rFLT1 | 2680 | AUGAUGCCAGCAAgUGGGA |
| rKDR | 2701 | AUGAUGCCAGCAAgUGGGA |
| hKDR | 3712 | CAGACCAUGCUGGACUGCU |
| hFLT1 | 3640 | CAGAuCAUGCUGGACUGCU |
| mFLT1 | 3417 | CAaAuCAUGuUGGAuUGCU |
| mKDR | 3610 | CAGACCAUGCUGGACUGCU |
| rFLT1 | 3627 | CAaAuCAUGCUGGAuUGCU |
| rKDR | 3645 | CAaACCAUGCUGGAuUGCU |
| hKDR | 3713 | AGACCAUGCUGGACUGCUG |
| hFLT1 | 3641 | AGAuCAUGCUGGACUGCUG |
| mFLT1 | 3418 | AaAuCAUGuUGGAuUGCUG |
| mKDR | 3611 | AGACCAUGCUGGACUGCUG |
| rFLT1 | 3628 | AaAuCAUGCUGGAuUGCUG |
| rKDR | 3646 | AaACCAUGCUGGAuUGCUG |
| hKDR | 3714 | GACCAUGCUGGACUGCUGG |
| hFLT1 | 3642 | GAuCAUGCUGGACUGCUGG |
| mFLT1 | 3419 | aAuCAUGuUGGAuUGCUGG |
| mKDR | 3612 | GACCAUGCUGGACUGCUGG |
| rFLT1 | 3629 | aAuCAUGCUGGAuUGCUGG |
| rKDR | 3647 | aACCAUGCUGGAuUGCUGG |
| hKDR | 3715 | ACCAUGCUGGACUGCUGGC |
| hFLT1 | 3643 | AuCAUGCUGGACUGCUGGC |
| mFLT1 | 3420 | AuCAUGuUGGAuUGCUGGC |
| mKDR | 3613 | ACCAUGCUGGACUGCUGGC |
| rFLT1 | 3630 | AuCAUGCUGGAuUGCUGGC |
| rKDR | 3648 | ACCAUGCUGGAuUGCUGGC |
| hKDR | 3716 | CCAUGCUGGACUGCUGGCA |
| hFLT1 | 3644 | uCAUGCUGGACUGCUGGCA |
| mFLT1 | 3421 | uCAUGuUGGAuUGCUGGCA |
| mKDR | 3614 | CCAUGCUGGACUGCUGGCA |
| rFLT1 | 3631 | uCAUGCUGGAuUGCUGGCA |
| rKDR | 3649 | CCAUGCUGGAuUGCUGGCA |
| hKDR | 3811 | CAGGAUGGCAAAGACUACA |
| hFLT1 | 3739 | CAGGAUGGuAAAGACUACA |
| mFLT1 | 3516 | CAGGAUGGgAAAGAuUACA |
| mKDR | 3709 | CAGGAUGGCAAAGACUAuA |
| rFLT1 | 3726 | CAGGAUGGuAAAGACUACA |
| rKDR | 3744 | CAGGAUGGCAAAGACUAuA |
| hKDR | 3812 | AGGAUGGCAAAGACUACAU |
| hFLT1 | 3740 | AGGAUGGuAAAGACUACAU |
| mFLT1 | 3517 | AGGAUGGgAAAGAuUACAU |
| mKDR | 3710 | AGGAUGGCAAAGACUAuAU |
| rFLT1 | 3727 | AGGAUGGuAAAGACUACAU |
| rKDR | 3745 | AGGAUGGCAAAGACUAuAU |

Lower case nucleotides represent mismatches

[0493] TABLE IV
Non-limiting examples of Stabilization Chemistries
for chemically modified siNA constructs

| Chemistry | pyrimidine | Purine | cap | p = S | Strand |
|---|---|---|---|---|---|
| “Stab 00” | Ribo | Ribo | TT at | | S/AS |
| | | | 3′-ends | | |
| “Stab 1” | Ribo | Ribo | — | 5 at 5′-end | S/AS |
| | | | | 1 at 3′-end | |
| “Stab 2” | Ribo | Ribo | — | All | Usually AS |
| | | | | linkages | |
| “Stab 3” | 2′-fluoro | Ribo | — | 4 at 5′-end | Usually S |
| | | | | 4 at 3′-end | |
| “Stab 4” | 2′-fluoro | Ribo | 5′ and | — | Usually S |
| | | | 3′-ends | | |
| “Stab 5” | 2′-fluoro | Ribo | — | 1 at 3′-end | Usually AS |
| “Stab 6” | 2′-O-Methyl | Ribo | 5′ and | — | Usually S |
| | | | 3′-ends | | |
| “Stab 7” | 2′-fluoro | 2′-deoxy | 5′ and | — | Usually S |
| | | | 3′-ends | | |
| “Stab 8” | 2′-fluoro | 2′-O- | — | 1 at 3′-end | Usually AS |
| | | Methyl | | | |
| “Stab 9” | Ribo | Ribo | 5′ and | — | Usually S |
| | | | 3′-ends | | |
| “Stab 10” | Ribo | Ribo | — | 1 at 3′-end | Usually AS |
| “Stab 11” | 2′-fluoro | 2′-deoxy | — | 1 at 3′-end | Usually AS |
| “Stab 12” | 2′-fluoro | LNA | 5′ and | | Usually S |
| | | | 3′-ends | | |
| “Stab 13” | 2′-fluoro | LNA | | 1 at 3′-end | Usually AS |
| “Stab 14” | 2′-fluoro | 2′-deoxy | | 2 at 5′-end | Usually AS |
| | | | | 1 at 3′-end | |
| “Stab 15” | 2′-deoxy | 2′-deoxy | | 2 at 5′-end | Usually AS |
| | | | | 1 at 3′-end | |
| “Stab 16 | Ribo | 2′-O- | 5′ and | | Usually S |
| | | Methyl | 3′-ends | | |
| “Stab 17” | 2′-O-Methyl | 2′-O- | 5′ and | | Usually S |
| | | Methyl | 3′-ends | | |
| “Stab 18” | 2′-fluoro | 2′-O- | 5′ and | 1 at 3′-end | Usually S |
| | | Methyl | 3′-ends | | |
| “Stab 19” | 2′-fluoro | 2′-O- | 3′-end | | Usually AS |
| | | Methyl | | | |
| “Stab 20” | 2′-fluoro | 2′-deoxy | 3′-end | | Usually AS |
| “Stab 21” | 2′-fluoro | Ribo | 3′-end | | Usually AS |
| “Stab 22” | Ribo | Ribo | 3′-end- | | Usually AS |
| “Stab 23” | Ribo | Ribo | TT at | 1 at 3′-end | S/AS |
| | | | 3′-ends | | |

CAP = any terminal cap, see for example FIG. 10.
All Stab 1-23 chemistries can comprise 3′-terminal thymidine (TT) residues
All Stab 1-23 chemistries typically comprise about 21 nucleotides, but can vary as described herein.
S = sense strand
AS = antisense strand

[0494] TABLE V

| | | | | | |
|---|---|---|---|---|---|
| Reagent | Equivalents | Amount | Wait Time* DNA | Wait Time* 2′-O-methyl | Wait Time*RNA |

A. 2.5 μmol Synthesis Cycle ABI 394 Instrument

| | | | | | | |
|---|---|---|---|---|---|---|
| Phosphoramidites | 6.5 | 163 | μL | 45 sec | 2.5 min | 7.5 min |
| S-Ethyl Tetrazole | 23.8 | 238 | μL | 45 sec | 2.5 min | 7.5 min |
| Acetic Anhydride | 100 | 233 | μL | 5 sec | 5 sec | 5 sec |
| N-Methyl | 186 | 233 | μL | 5 sec | 5 sec | 5 sec |
| Imidazole | | | | | | |
| TCA | 176 | 2.3 | mL | 21 sec | 21 sec | 21 sec |
| Iodine | 11.2 | 1.7 | mL | 45 sec | 45 sec | 45 sec |
| Beaucage | 12.9 | 645 | μL | 100 sec | 300 sec | 300 sec |
| Acetonitrile | NA | 6.67 | mL | NA | NA | NA |

B. 0.2 μmol Synthesis Cycle ABI 394 Instrument

| | | | | | | |
|---|---|---|---|---|---|---|
| Phosphoramidites | 15 | 31 | μL | 45 sec | 233 sec | 465 sec |
| S-Ethyl Tetrazole | 38.7 | 31 | μL | 45 sec | 233 min | 465 sec |
| Acetic Anhydride | 655 | 124 | μL | 5 sec | 5 sec | 5 sec |
| N-Methyl | 1245 | 124 | μL | 5 sec | 5 sec | 5 sec |
| Imidazole | | | | | | |
| TCA | 700 | 732 | μL | 10 sec | 10 sec | 10 sec |
| Iodine | 20.6 | 244 | μL | 15 sec | 15 sec | 15 sec |
| Beaucage | 7.7 | 232 | μL | 100 sec | 300 sec | 300 sec |
| Acetonitrile | NA | 2.64 | mL | NA | NA | NA |

C. 0.2 μmol Synthesis Cycle 96 well Instrument

| | Equivalents: DNA/ | Amount: DNA/2′-O- | | | Wait Time* 2′-O- | |
|---|---|---|---|---|---|---|
| Reagent | 2′-O-methyl/Ribo | methyl/Ribo | | Wait Time* DNA | methyl | Wait Time* Ribo |
| Phosphoramidites | 22/33/66 | 40/60/120 | μL | 60 sec | 180 sec | 360 sec |
| S-Ethyl Tetrazole | 70/105/210 | 40/60/120 | μL | 60 sec | 180 min | 360 sec |
| Acetic Anhydride | 265/265/265 | 50/50/50 | μL | 10 sec | 10 sec | 10 sec |
| N-Methyl | 502/502/502 | 50/50/50 | μL | 10 sec | 10 sec | 10 sec |
| Imidazole | | | | | | |
| TCA | 238/475/475 | 250/500/500 | μL | 15 sec | 15 sec | 15 sec |
| Iodine | 6.8/6.8/6.8 | 80/80/80 | μL | 30 sec | 30 sec | 30 sec |
| Beaucage | 34/51/51 | 80/120/120 | | 100 sec | 200 sec | 200 sec |
| Acetonitrile | NA | 1150/1150/1150 | μL | NA | NA | NA |

*Wait time does not include contact time during delivery.
*Tandem synthesis utilizes double coupling of linker molecule

[0495] TABLE VI

| | Cell | | Number | | | |
|---|---|---|---|---|---|---|
| | type/Location | | of | | | Growth |
| Group | of tumor | Inoculum | Animals | Treatment | Endpoints | Period |
| 1 | 4T1-luciferase | 1.0 × 10⁶ | 10 | NA | Tumors | 15d |
| | cells/animal | | | | collected | |
| | in right flank | | | | and flash | |
| | | | | | frozen for | |
| | | | | | analysis of | |
| | | | | | luciferase | |
| | | | | | expression | |
| 2 | 4T1-luciferase | 1.0 × 10⁶ | 10 | Saline, | Tumor | 21d |
| | cells/animal | | | Daily IV | volume, | |
| | in right flank | | | injection, | tumors | |
| | | | | 100 μL | flash | |
| | | | | | frozen for | |
| | | | | | IHC, | |
| | | | | | expression | |
| | | | | | of VEGFR- | |
| | | | | | 1 and R2 | |
| | | | | | and | |
| | | | | | endoglin | |
| 3 | 4T1-luciferase | 1.0 × 10⁶ | 10 | 349-9/10 | Tumor | 21d |
| | cells/animal | | | ACTIVE, 30 mg/ | volume, | |
| | in right flank | | | kg/d, | tumors | |
| | | | | daily IV | flash | |
| | | | | | frozen for | |
| | | | | | IHC, | |
| | | | | | expression | |
| | | | | | of VEGFR- | |
| | | | | | 1 and R2 | |
| | | | | | and | |
| | | | | | endoglin | |
| 4 | 4T1-luciferase | 1.0 × 10⁶ | 10 | 349-9/10 | Tumor | 21d |
| | cells/animal | | | INVERTED, | volume, | |
| | in right flank | | | 30 mg/kg/d, | tumors | |
| | | | | daily IV | flash | |
| | | | | | frozen for | |
| | | | | | IHC, | |
| | | | | | expression | |
| | | | | | of VEGFR- | |
| | | | | | 1 and R2 | |
| | | | | | and | |
| | | | | | endoglin | |

[0496] TABLE VII

| | | | | | | |
|---|---|---|---|---|---|---|
| | Solution | | | | | |
| | on | Stock VEGF | Number of | Injectate | | Conc. |
| Group | Filter | concentration | Animals | (1.2 μL) | Dose | injectate |

| | | | | | | |
|---|---|---|---|---|---|---|
| 1 | R&D | 3.53 μg/μL | 5 | water | 1.0 μg | 0.833 |
| | Systems | | | | | μg/μL |
| | hVEGF | | | | | Each |
| | | | | | | strand |
| 2 | R&D | 3.53 μg/μL | 5 | siRNA 3645- | 1.0 μg | 0.833 |
| | Systems | | | 9/10-Active | | μg/μL |
| | hVEGF | | | | | Each |
| | | | | | | strand |
| 3 | R&D | 3.53 μg/μL | 5 | siRNA 3646- | 1.0 μg | 0.833 |
| | Systems | | | 9/10-Active | | μg/μL |
| | hVEGF | | | | | Each |
| | | | | | | strand |
| 4 | R&D | 3.53 μg/μL | 5 | siRNA 3715- | 1.0 μg | 0.833 |
| | Systems | | | 9/10-Active | | μg/μL |
| | hVEGF | | | | | Each |
| | | | | | | strand |
| 5 | R&D | 3.53 μg/μL | 5 | siRNA 3716- | 1.0 μg | 0.833 |
| | Systems | | | 9/10-Active | | μg/μL |
| | hVEGF | | | | | Each |
| | | | | | | strand |
| 6 | R&D | 3.53 μg/μL | 5 | siRNA 3645- | 1.0 μg | 0.833 |
| | Systems | | | 9/10-Inverted | | μg/μL |
| | hVEGF | | | | | Each |
| | | | | | | strand |
| 7 | R&D | 3.53 μg/μL | 5 | siRNA 3645- | 1.0 μg | 0.833 |
| | Systems | | | 9/10-Active | | μg/μL |
| | hVEGF | | | | | Each |
| | | | | | | strand |
| 8 | R&D | 3.53 μg/μL | 5 | siRNA 3646- | 1.0 μg | 0.833 |
| | Systems | | | 9/10-Active | | μg/μL |
| | hVEGF | | | | | Each |
| | | | | | | strand |
| 9 | R&D | 3.53 μg/μL | 5 | siRNA 3715- | 1.0 μg. | 0.833 |
| | Systems | | | 9/10-Active | | μg/μL |
| | hVEGF | | | | | Each |
| | | | | | | strand |
| 10 | R&D | 3.53 μg/μL | 5 | siRNA 3716- | 1.0 μg. | 0.833 |
| | Systems | | | 9/10-Active | | μg/μL |
| | hVEGF | | | | | Each |
| | | | | | | strand |
| 11 | R&D | 3.53 μg/μL | 5 | siRNA 3645- | 1.0 μg. | 0.833 |
| | Systems | | | 9/10-Inverted | | μg/μL |
| | hVEGF | | | | | Each |
| | | | | | | strand |
| 12 | R&D | 3.53 μg/μL | 5 | SiRNA 349- | 1.0 μg. | 0.833 |
| | Systems | | | 9/10 Active | | μg/μL |
| | hVEGF | | | | | Each |
| | | | | | | strand |

The application's sequence listing, which the Patent Office published only in electronic form, follows.

SEQUENCE LISTING (2751 sequences)

SEQ ID NO: 1 - RNA, 19 nt, Artificial Sequence
  Description of Artificial Sequence:  Target Sequence/siNA sense region
gcggacacuccucucggcu

SEQ ID NO: 2 - RNA, 19 nt, Artificial Sequence
  Description of Artificial Sequence:  Target Sequence/siNA sense region
uccuccccggcagcggcgg

SEQ ID NO: 3 - RNA, 19 nt, Artificial Sequence
  Description of Artificial Sequence:  Target Sequence/siNA sense region
gcggcucggagcgggcucc

SEQ ID NO: 4 - RNA, 19 nt, Artificial Sequence
  Description of Artificial Sequence:  Target Sequence/siNA sense region
cggggcucgggugcagcgg

SEQ ID NO: 5 - RNA, 19 nt, Artificial Sequence
  Description of Artificial Sequence:  Target Sequence/siNA sense region
gccagcgggccuggcggcg

SEQ ID NO: 6 - RNA, 19 nt, Artificial Sequence
  Description of Artificial Sequence:  Target Sequence/siNA sense region
gaggauuacccggggaagu

SEQ ID NO: 7 - RNA, 19 nt, Artificial Sequence
  Description of Artificial Sequence:  Target Sequence/siNA sense region
ugguugucuccuggcugga

SEQ ID NO: 8 - RNA, 19 nt, Artificial Sequence
  Description of Artificial Sequence:  Target Sequence/siNA sense region
agccgcgagacgggcgcuc

SEQ ID NO: 9 - RNA, 19 nt, Artificial Sequence
  Description of Artificial Sequence:  Target Sequence/siNA sense region
cagggcgcggggccggcgg

SEQ ID NO: 10 - RNA, 19 nt, Artificial Sequence
  Description of Artificial Sequence:  Target Sequence/siNA sense region
gcggcgaacgagaggacgg

SEQ ID NO: 11 - RNA, 19 nt, Artificial Sequence
  Description of Artificial Sequence:  Target Sequence/siNA sense region
gacucuggcggccgggucg

SEQ ID NO: 12 - RNA, 19 nt, Artificial Sequence
  Description of Artificial Sequence:  Target Sequence/siNA sense region
guuggccgggggagcgcgg

SEQ ID NO: 13 - RNA, 19 nt, Artificial Sequence
  Description of Artificial Sequence:  Target Sequence/siNA sense region
ggcaccgggcgagcaggcc

SEQ ID NO: 14 - RNA, 19 nt, Artificial Sequence
  Description of Artificial Sequence:  Target Sequence/siNA sense region
cgcgucgcgcucaccaugg

SEQ ID NO: 15 - RNA, 19 nt, Artificial Sequence
  Description of Artificial Sequence:  Target Sequence/siNA sense region
gucagcuacugggacaccg

SEQ ID NO: 16 - RNA, 19 nt, Artificial Sequence
  Description of Artificial Sequence:  Target Sequence/siNA sense region
gggguccugcugugcgcgc

SEQ ID NO: 17 - RNA, 19 nt, Artificial Sequence
  Description of Artificial Sequence:  Target Sequence/siNA sense region
cugcucagcugucugcuuc

SEQ ID NO: 18 - RNA, 19 nt, Artificial Sequence
  Description of Artificial Sequence:  Target Sequence/siNA sense region
cucacaggaucuaguucag

SEQ ID NO: 19 - RNA, 19 nt, Artificial Sequence
  Description of Artificial Sequence:  Target Sequence/siNA sense region
gguucaaaauuaaaagauc

SEQ ID NO: 20 - RNA, 19 nt, Artificial Sequence
  Description of Artificial Sequence:  Target Sequence/siNA sense region
ccugaacugaguuuaaaag

SEQ ID NO: 21 - RNA, 19 nt, Artificial Sequence
  Description of Artificial Sequence:  Target Sequence/siNA sense region
ggcacccagcacaucaugc

SEQ ID NO: 22 - RNA, 19 nt, Artificial Sequence
  Description of Artificial Sequence:  Target Sequence/siNA sense region
caagcaggccagacacugc

SEQ ID NO: 23 - RNA, 19 nt, Artificial Sequence
  Description of Artificial Sequence:  Target Sequence/siNA sense region
caucuccaaugcagggggg

SEQ ID NO: 24 - RNA, 19 nt, Artificial Sequence
  Description of Artificial Sequence:  Target Sequence/siNA sense region
gaagcagcccauaaauggu

SEQ ID NO: 25 - RNA, 19 nt, Artificial Sequence
  Description of Artificial Sequence:  Target Sequence/siNA sense region
ucuuugccugaaaugguga

SEQ ID NO: 26 - RNA, 19 nt, Artificial Sequence
  Description of Artificial Sequence:  Target Sequence/siNA sense region
aguaaggaaagcgaaaggc

SEQ ID NO: 27 - RNA, 19 nt, Artificial Sequence
  Description of Artificial Sequence:  Target Sequence/siNA sense region
cugagcauaacuaaaucug

SEQ ID NO: 28 - RNA, 19 nt, Artificial Sequence
  Description of Artificial Sequence:  Target Sequence/siNA sense region
gccuguggaagaaauggca

SEQ ID NO: 29 - RNA, 19 nt, Artificial Sequence
  Description of Artificial Sequence:  Target Sequence/siNA sense region
aaacaauucugcaguacuu

SEQ ID NO: 30 - RNA, 19 nt, Artificial Sequence
  Description of Artificial Sequence:  Target Sequence/siNA sense region
uuaaccuugaacacagcuc

SEQ ID NO: 31 - RNA, 19 nt, Artificial Sequence
  Description of Artificial Sequence:  Target Sequence/siNA sense region
caagcaaaccacacuggcu

SEQ ID NO: 32 - RNA, 19 nt, Artificial Sequence
  Description of Artificial Sequence:  Target Sequence/siNA sense region
uucuacagcugcaaauauc

SEQ ID NO: 33 - RNA, 19 nt, Artificial Sequence
  Description of Artificial Sequence:  Target Sequence/siNA sense region
cuagcuguaccuacuucaa

SEQ ID NO: 34 - RNA, 19 nt, Artificial Sequence
  Description of Artificial Sequence:  Target Sequence/siNA sense region
aagaagaaggaaacagaau

SEQ ID NO: 35 - RNA, 19 nt, Artificial Sequence
  Description of Artificial Sequence:  Target Sequence/siNA sense region
ucugcaaucuauauauuua

SEQ ID NO: 36 - RNA, 19 nt, Artificial Sequence
  Description of Artificial Sequence:  Target Sequence/siNA sense region
auuagugauacagguagac

SEQ ID NO: 37 - RNA, 19 nt, Artificial Sequence
  Description of Artificial Sequence:  Target Sequence/siNA sense region
ccuuucguagagauguaca

SEQ ID NO: 38 - RNA, 19 nt, Artificial Sequence
  Description of Artificial Sequence:  Target Sequence/siNA sense region
agugaaauccccgaaauua

SEQ ID NO: 39 - RNA, 19 nt, Artificial Sequence
  Description of Artificial Sequence:  Target Sequence/siNA sense region
auacacaugacugaaggaa

SEQ ID NO: 40 - RNA, 19 nt, Artificial Sequence
  Description of Artificial Sequence:  Target Sequence/siNA sense region
agggagcucgucauucccu

SEQ ID NO: 41 - RNA, 19 nt, Artificial Sequence
  Description of Artificial Sequence:  Target Sequence/siNA sense region
ugccggguuacgucaccua

SEQ ID NO: 42 - RNA, 19 nt, Artificial Sequence
  Description of Artificial Sequence:  Target Sequence/siNA sense region
aacaucacuguuacuuuaa

SEQ ID NO: 43 - RNA, 19 nt, Artificial Sequence
  Description of Artificial Sequence:  Target Sequence/siNA sense region
aaaaaguuuccacuugaca

SEQ ID NO: 44 - RNA, 19 nt, Artificial Sequence
  Description of Artificial Sequence:  Target Sequence/siNA sense region
acuuugaucccugauggaa

SEQ ID NO: 45 - RNA, 19 nt, Artificial Sequence
  Description of Artificial Sequence:  Target Sequence/siNA sense region
aaacgcauaaucugggaca

SEQ ID NO: 46 - RNA, 19 nt, Artificial Sequence
  Description of Artificial Sequence:  Target Sequence/siNA sense region
aguagaaagggcuucauca

SEQ ID NO: 47 - RNA, 19 nt, Artificial Sequence
  Description of Artificial Sequence:  Target Sequence/siNA sense region
auaucaaaugcaacguaca

SEQ ID NO: 48 - RNA, 19 nt, Artificial Sequence
  Description of Artificial Sequence:  Target Sequence/siNA sense region
aaagaaauagggcuucuga

SEQ ID NO: 49 - RNA, 19 nt, Artificial Sequence
  Description of Artificial Sequence:  Target Sequence/siNA sense region
accugugaagcaacaguca

SEQ ID NO: 50 - RNA, 19 nt, Artificial Sequence
  Description of Artificial Sequence:  Target Sequence/siNA sense region
aaugggcauuuguauaaga

SEQ ID NO: 51 - RNA, 19 nt, Artificial Sequence
  Description of Artificial Sequence:  Target Sequence/siNA sense region
acaaacuaucucacacauc

SEQ ID NO: 52 - RNA, 19 nt, Artificial Sequence
  Description of Artificial Sequence:  Target Sequence/siNA sense region
cgacaaaccaauacaauca

SEQ ID NO: 53 - RNA, 19 nt, Artificial Sequence
  Description of Artificial Sequence:  Target Sequence/siNA sense region
auagauguccaaauaagca

SEQ ID NO: 54 - RNA, 19 nt, Artificial Sequence
  Description of Artificial Sequence:  Target Sequence/siNA sense region
acaccacgcccagucaaau

SEQ ID NO: 55 - RNA, 19 nt, Artificial Sequence
  Description of Artificial Sequence:  Target Sequence/siNA sense region
uuacuuagaggccauacuc

SEQ ID NO: 56 - RNA, 19 nt, Artificial Sequence
  Description of Artificial Sequence:  Target Sequence/siNA sense region
cuuguccucaauuguacug

SEQ ID NO: 57 - RNA, 19 nt, Artificial Sequence
  Description of Artificial Sequence:  Target Sequence/siNA sense region
gcuaccacucccuugaaca

SEQ ID NO: 58 - RNA, 19 nt, Artificial Sequence
  Description of Artificial Sequence:  Target Sequence/siNA sense region
acgagaguucaaaugaccu

SEQ ID NO: 59 - RNA, 19 nt, Artificial Sequence
  Description of Artificial Sequence:  Target Sequence/siNA sense region
uggaguuacccugaugaaa

SEQ ID NO: 60 - RNA, 19 nt, Artificial Sequence
  Description of Artificial Sequence:  Target Sequence/siNA sense region
aaaaauaagagagcuuccg

SEQ ID NO: 61 - RNA, 19 nt, Artificial Sequence
  Description of Artificial Sequence:  Target Sequence/siNA sense region
guaaggcgacgaauugacc

SEQ ID NO: 62 - RNA, 19 nt, Artificial Sequence
  Description of Artificial Sequence:  Target Sequence/siNA sense region
caaagcaauucccaugcca

SEQ ID NO: 63 - RNA, 19 nt, Artificial Sequence
  Description of Artificial Sequence:  Target Sequence/siNA sense region
aacauauucuacaguguuc

SEQ ID NO: 64 - RNA, 19 nt, Artificial Sequence
  Description of Artificial Sequence:  Target Sequence/siNA sense region
cuuacuauugacaaaaugc

SEQ ID NO: 65 - RNA, 19 nt, Artificial Sequence
  Description of Artificial Sequence:  Target Sequence/siNA sense region
cagaacaaagacaaaggac

SEQ ID NO: 66 - RNA, 19 nt, Artificial Sequence
  Description of Artificial Sequence:  Target Sequence/siNA sense region
cuuuauacuugucguguaa

SEQ ID NO: 67 - RNA, 19 nt, Artificial Sequence
  Description of Artificial Sequence:  Target Sequence/siNA sense region
aggaguggaccaucauuca

SEQ ID NO: 68 - RNA, 19 nt, Artificial Sequence
  Description of Artificial Sequence:  Target Sequence/siNA sense region
aaaucuguuaacaccucag

SEQ ID NO: 69 - RNA, 19 nt, Artificial Sequence
  Description of Artificial Sequence:  Target Sequence/siNA sense region
gugcauauauaugauaaag

SEQ ID NO: 70 - RNA, 19 nt, Artificial Sequence
  Description of Artificial Sequence:  Target Sequence/siNA sense region
gcauucaucacugugaaac

SEQ ID NO: 71 - RNA, 19 nt, Artificial Sequence
  Description of Artificial Sequence:  Target Sequence/siNA sense region
caucgaaaacagcaggugc

SEQ ID NO: 72 - RNA, 19 nt, Artificial Sequence
  Description of Artificial Sequence:  Target Sequence/siNA sense region
cuugaaaccguagcuggca

SEQ ID NO: 73 - RNA, 19 nt, Artificial Sequence
  Description of Artificial Sequence:  Target Sequence/siNA sense region
aagcggucuuaccggcucu

SEQ ID NO: 74 - RNA, 19 nt, Artificial Sequence
  Description of Artificial Sequence:  Target Sequence/siNA sense region
ucuaugaaagugaaggcau

SEQ ID NO: 75 - RNA, 19 nt, Artificial Sequence
  Description of Artificial Sequence:  Target Sequence/siNA sense region
uuucccucgccggaaguug

SEQ ID NO: 76 - RNA, 19 nt, Artificial Sequence
  Description of Artificial Sequence:  Target Sequence/siNA sense region
guaugguuaaaagaugggu

SEQ ID NO: 77 - RNA, 19 nt, Artificial Sequence
  Description of Artificial Sequence:  Target Sequence/siNA sense region
uuaccugcgacugagaaau

SEQ ID NO: 78 - RNA, 19 nt, Artificial Sequence
  Description of Artificial Sequence:  Target Sequence/siNA sense region
ucugcucgcuauuugacuc

SEQ ID NO: 79 - RNA, 19 nt, Artificial Sequence
  Description of Artificial Sequence:  Target Sequence/siNA sense region
cguggcuacucguuaauua

SEQ ID NO: 80 - RNA, 19 nt, Artificial Sequence
  Description of Artificial Sequence:  Target Sequence/siNA sense region
aucaaggacguaacugaag

SEQ ID NO: 81 - RNA, 19 nt, Artificial Sequence
  Description of Artificial Sequence:  Target Sequence/siNA sense region
gaggaugcagggaauuaua

SEQ ID NO: 82 - RNA, 19 nt, Artificial Sequence
  Description of Artificial Sequence:  Target Sequence/siNA sense region
acaaucuugcugagcauaa

SEQ ID NO: 83 - RNA, 19 nt, Artificial Sequence
  Description of Artificial Sequence:  Target Sequence/siNA sense region
aaacagucaaauguguuua

SEQ ID NO: 84 - RNA, 19 nt, Artificial Sequence
  Description of Artificial Sequence:  Target Sequence/siNA sense region
aaaaaccucacugccacuc

SEQ ID NO: 85 - RNA, 19 nt, Artificial Sequence
  Description of Artificial Sequence:  Target Sequence/siNA sense region
cuaauugucaaugugaaac

SEQ ID NO: 86 - RNA, 19 nt, Artificial Sequence
  Description of Artificial Sequence:  Target Sequence/siNA sense region
ccccagauuuacgaaaagg

SEQ ID NO: 87 - RNA, 19 nt, Artificial Sequence
  Description of Artificial Sequence:  Target Sequence/siNA sense region
gccgugucaucguuuccag

SEQ ID NO: 88 - RNA, 19 nt, Artificial Sequence
  Description of Artificial Sequence:  Target Sequence/siNA sense region
gacccggcucucuacccac

SEQ ID NO: 89 - RNA, 19 nt, Artificial Sequence
  Description of Artificial Sequence:  Target Sequence/siNA sense region
cugggcagcagacaaaucc

SEQ ID NO: 90 - RNA, 19 nt, Artificial Sequence
  Description of Artificial Sequence:  Target Sequence/siNA sense region
cugacuuguaccgcauaug

SEQ ID NO: 91 - RNA, 19 nt, Artificial Sequence
  Description of Artificial Sequence:  Target Sequence/siNA sense region
gguaucccucaaccuacaa

SEQ ID NO: 92 - RNA, 19 nt, Artificial Sequence
  Description of Artificial Sequence:  Target Sequence/siNA sense region
aucaagugguucuggcacc

SEQ ID NO: 93 - RNA, 19 nt, Artificial Sequence
  Description of Artificial Sequence:  Target Sequence/siNA sense region
cccuguaaccauaaucauu

SEQ ID NO: 94 - RNA, 19 nt, Artificial Sequence
  Description of Artificial Sequence:  Target Sequence/siNA sense region
uccgaagcaaggugugacu

SEQ ID NO: 95 - RNA, 19 nt, Artificial Sequence
  Description of Artificial Sequence:  Target Sequence/siNA sense region
uuuuguuccaauaaugaag

SEQ ID NO: 96 - RNA, 19 nt, Artificial Sequence
  Description of Artificial Sequence:  Target Sequence/siNA sense region
gaguccuuuauccuggaug

SEQ ID NO: 97 - RNA, 19 nt, Artificial Sequence
  Description of Artificial Sequence:  Target Sequence/siNA sense region
gcugacagcaacaugggaa

SEQ ID NO: 98 - RNA, 19 nt, Artificial Sequence
  Description of Artificial Sequence:  Target Sequence/siNA sense region
aacagaauugagagcauca

SEQ ID NO: 99 - RNA, 19 nt, Artificial Sequence
  Description of Artificial Sequence:  Target Sequence/siNA sense region
acucagcgcauggcaauaa

SEQ ID NO: 100 - RNA, 19 nt, Artificial Sequence
  Description of Artificial Sequence:  Target Sequence/siNA sense region
auagaaggaaagaauaaga

SEQ ID NO: 101 - RNA, 19 nt, Artificial Sequence
  Description of Artificial Sequence:  Target Sequence/siNA sense region
auggcuagcaccuugguug

SEQ ID NO: 102 - RNA, 19 nt, Artificial Sequence
  Description of Artificial Sequence:  Target Sequence/siNA sense region
guggcugacucuagaauuu

SEQ ID NO: 103 - RNA, 19 nt, Artificial Sequence
  Description of Artificial Sequence:  Target Sequence/siNA sense region
ucuggaaucuacauuugca

SEQ ID NO: 104 - RNA, 19 nt, Artificial Sequence
  Description of Artificial Sequence:  Target Sequence/siNA sense region
auagcuuccaauaaaguug

SEQ ID NO: 105 - RNA, 19 nt, Artificial Sequence
  Description of Artificial Sequence:  Target Sequence/siNA sense region
gggacugugggaagaaaca

SEQ ID NO: 106 - RNA, 19 nt, Artificial Sequence
  Description of Artificial Sequence:  Target Sequence/siNA sense region
auaagcuuuuauaucacag

SEQ ID NO: 107 - RNA, 19 nt, Artificial Sequence
  Description of Artificial Sequence:  Target Sequence/siNA sense region
gaugugccaaauggguuuc

SEQ ID NO: 108 - RNA, 19 nt, Artificial Sequence
  Description of Artificial Sequence:  Target Sequence/siNA sense region
cauguuaacuuggaaaaaa

SEQ ID NO: 109 - RNA, 19 nt, Artificial Sequence
  Description of Artificial Sequence:  Target Sequence/siNA sense region
augccgacggaaggagagg

SEQ ID NO: 110 - RNA, 19 nt, Artificial Sequence
  Description of Artificial Sequence:  Target Sequence/siNA sense region
gaccugaaacugucuugca

SEQ ID NO: 111 - RNA, 19 nt, Artificial Sequence
  Description of Artificial Sequence:  Target Sequence/siNA sense region
acaguuaacaaguucuuau

SEQ ID NO: 112 - RNA, 19 nt, Artificial Sequence
  Description of Artificial Sequence:  Target Sequence/siNA sense region
uacagagacguuacuugga

SEQ ID NO: 113 - RNA, 19 nt, Artificial Sequence
  Description of Artificial Sequence:  Target Sequence/siNA sense region
auuuuacugcggacaguua

SEQ ID NO: 114 - RNA, 19 nt, Artificial Sequence
  Description of Artificial Sequence:  Target Sequence/siNA sense region
aauaacagaacaaugcacu

SEQ ID NO: 115 - RNA, 19 nt, Artificial Sequence
  Description of Artificial Sequence:  Target Sequence/siNA sense region
uacaguauuagcaagcaaa

SEQ ID NO: 116 - RNA, 19 nt, Artificial Sequence
  Description of Artificial Sequence:  Target Sequence/siNA sense region
aaaauggccaucacuaagg

SEQ ID NO: 117 - RNA, 19 nt, Artificial Sequence
  Description of Artificial Sequence:  Target Sequence/siNA sense region
gagcacuccaucacucuua

SEQ ID NO: 118 - RNA, 19 nt, Artificial Sequence
  Description of Artificial Sequence:  Target Sequence/siNA sense region
aaucuuaccaucaugaaug

SEQ ID NO: 119 - RNA, 19 nt, Artificial Sequence
  Description of Artificial Sequence:  Target Sequence/siNA sense region
guuucccugcaagauucag

SEQ ID NO: 120 - RNA, 19 nt, Artificial Sequence
  Description of Artificial Sequence:  Target Sequence/siNA sense region
ggcaccuaugccugcagag

SEQ ID NO: 121 - RNA, 19 nt, Artificial Sequence
  Description of Artificial Sequence:  Target Sequence/siNA sense region
gccaggaauguauacacag

SEQ ID NO: 122 - RNA, 19 nt, Artificial Sequence
  Description of Artificial Sequence:  Target Sequence/siNA sense region
ggggaagaaauccuccaga

SEQ ID NO: 123 - RNA, 19 nt, Artificial Sequence
  Description of Artificial Sequence:  Target Sequence/siNA sense region
aagaaagaaauuacaauca

SEQ ID NO: 124 - RNA, 19 nt, Artificial Sequence
  Description of Artificial Sequence:  Target Sequence/siNA sense region
agagaucaggaagcaccau

SEQ ID NO: 125 - RNA, 19 nt, Artificial Sequence
  Description of Artificial Sequence:  Target Sequence/siNA sense region
uaccuccugcgaaaccuca

SEQ ID NO: 126 - RNA, 19 nt, Artificial Sequence
  Description of Artificial Sequence:  Target Sequence/siNA sense region
agugaucacacaguggcca

SEQ ID NO: 127 - RNA, 19 nt, Artificial Sequence
  Description of Artificial Sequence:  Target Sequence/siNA sense region
aucagcaguuccaccacuu

SEQ ID NO: 128 - RNA, 19 nt, Artificial Sequence
  Description of Artificial Sequence:  Target Sequence/siNA sense region
uuagacugucaugcuaaug

SEQ ID NO: 129 - RNA, 19 nt, Artificial Sequence
  Description of Artificial Sequence:  Target Sequence/siNA sense region
gguguccccgagccucaga

SEQ ID NO: 130 - RNA, 19 nt, Artificial Sequence
  Description of Artificial Sequence:  Target Sequence/siNA sense region
aucacuugguuuaaaaaca

SEQ ID NO: 131 - RNA, 19 nt, Artificial Sequence
  Description of Artificial Sequence:  Target Sequence/siNA sense region
aaccacaaaauacaacaag

SEQ ID NO: 132 - RNA, 19 nt, Artificial Sequence
  Description of Artificial Sequence:  Target Sequence/siNA sense region
gagccuggaauuauuuuag

SEQ ID NO: 133 - RNA, 19 nt, Artificial Sequence
  Description of Artificial Sequence:  Target Sequence/siNA sense region
ggaccaggaagcagcacgc

SEQ ID NO: 134 - RNA, 19 nt, Artificial Sequence
  Description of Artificial Sequence:  Target Sequence/siNA sense region
cuguuuauugaaagaguca

SEQ ID NO: 135 - RNA, 19 nt, Artificial Sequence
  Description of Artificial Sequence:  Target Sequence/siNA sense region
acagaagaggaugaaggug

SEQ ID NO: 136 - RNA, 19 nt, Artificial Sequence
  Description of Artificial Sequence:  Target Sequence/siNA sense region
gucuaucacugcaaagcca

SEQ ID NO: 137 - RNA, 19 nt, Artificial Sequence
  Description of Artificial Sequence:  Target Sequence/siNA sense region
accaaccagaagggcucug

SEQ ID NO: 138 - RNA, 19 nt, Artificial Sequence
  Description of Artificial Sequence:  Target Sequence/siNA sense region
guggaaaguucagcauacc

SEQ ID NO: 139 - RNA, 19 nt, Artificial Sequence
  Description of Artificial Sequence:  Target Sequence/siNA sense region
cucacuguucaaggaaccu

SEQ ID NO: 140 - RNA, 19 nt, Artificial Sequence
  Description of Artificial Sequence:  Target Sequence/siNA sense region
ucggacaagucuaaucugg

SEQ ID NO: 141 - RNA, 19 nt, Artificial Sequence
  Description of Artificial Sequence:  Target Sequence/siNA sense region
gagcugaucacucuaacau

SEQ ID NO: 142 - RNA, 19 nt, Artificial Sequence
  Description of Artificial Sequence:  Target Sequence/siNA sense region
ugcaccuguguggcugcga

SEQ ID NO: 143 - RNA, 19 nt, Artificial Sequence
  Description of Artificial Sequence:  Target Sequence/siNA sense region
acucucuucuggcuccuau

SEQ ID NO: 144 - RNA, 19 nt, Artificial Sequence
  Description of Artificial Sequence:  Target Sequence/siNA sense region
uuaacccuccuuauccgaa

SEQ ID NO: 145 - RNA, 19 nt, Artificial Sequence
  Description of Artificial Sequence:  Target Sequence/siNA sense region
aaaaugaaaaggucuucuu

SEQ ID NO: 146 - RNA, 19 nt, Artificial Sequence
  Description of Artificial Sequence:  Target Sequence/siNA sense region
ucugaaauaaagacugacu

SEQ ID NO: 147 - RNA, 19 nt, Artificial Sequence
  Description of Artificial Sequence:  Target Sequence/siNA sense region
uaccuaucaauuauaaugg

SEQ ID NO: 148 - RNA, 19 nt, Artificial Sequence
  Description of Artificial Sequence:  Target Sequence/siNA sense region
gacccagaugaaguuccuu

SEQ ID NO: 149 - RNA, 19 nt, Artificial Sequence
  Description of Artificial Sequence:  Target Sequence/siNA sense region
uuggaugagcagugugagc

SEQ ID NO: 150 - RNA, 19 nt, Artificial Sequence
  Description of Artificial Sequence:  Target Sequence/siNA sense region
cggcucccuuaugaugcca

SEQ ID NO: 151 - RNA, 19 nt, Artificial Sequence
  Description of Artificial Sequence:  Target Sequence/siNA sense region
agcaagugggaguuugccc

SEQ ID NO: 152 - RNA, 19 nt, Artificial Sequence
  Description of Artificial Sequence:  Target Sequence/siNA sense region
cgggagagacuuaaacugg

SEQ ID NO: 153 - RNA, 19 nt, Artificial Sequence
  Description of Artificial Sequence:  Target Sequence/siNA sense region
ggcaaaucacuuggaagag

SEQ ID NO: 154 - RNA, 19 nt, Artificial Sequence
  Description of Artificial Sequence:  Target Sequence/siNA sense region
ggggcuuuuggaaaagugg

SEQ ID NO: 155 - RNA, 19 nt, Artificial Sequence
  Description of Artificial Sequence:  Target Sequence/siNA sense region
guucaagcaucagcauuug

SEQ ID NO: 156 - RNA, 19 nt, Artificial Sequence
  Description of Artificial Sequence:  Target Sequence/siNA sense region
ggcauuaagaaaucaccua

SEQ ID NO: 157 - RNA, 19 nt, Artificial Sequence
  Description of Artificial Sequence:  Target Sequence/siNA sense region
acgugccggacuguggcug

SEQ ID NO: 158 - RNA, 19 nt, Artificial Sequence
  Description of Artificial Sequence:  Target Sequence/siNA sense region
gugaaaaugcugaaagagg

SEQ ID NO: 159 - RNA, 19 nt, Artificial Sequence
  Description of Artificial Sequence:  Target Sequence/siNA sense region
ggggccacggccagcgagu

SEQ ID NO: 160 - RNA, 19 nt, Artificial Sequence
  Description of Artificial Sequence:  Target Sequence/siNA sense region
uacaaagcucugaugacug

SEQ ID NO: 161 - RNA, 19 nt, Artificial Sequence
  Description of Artificial Sequence:  Target Sequence/siNA sense region
gagcuaaaaaucuugaccc

SEQ ID NO: 162 - RNA, 19 nt, Artificial Sequence
  Description of Artificial Sequence:  Target Sequence/siNA sense region
cacauuggccaccaucuga

SEQ ID NO: 163 - RNA, 19 nt, Artificial Sequence
  Description of Artificial Sequence:  Target Sequence/siNA sense region
aacgugguuaaccugcugg

SEQ ID NO: 164 - RNA, 19 nt, Artificial Sequence
  Description of Artificial Sequence:  Target Sequence/siNA sense region
ggagccugcaccaagcaag

SEQ ID NO: 165 - RNA, 19 nt, Artificial Sequence
  Description of Artificial Sequence:  Target Sequence/siNA sense region
ggagggccucugaugguga

SEQ ID NO: 166 - RNA, 19 nt, Artificial Sequence
  Description of Artificial Sequence:  Target Sequence/siNA sense region
auuguugaauacugcaaau

SEQ ID NO: 167 - RNA, 19 nt, Artificial Sequence
  Description of Artificial Sequence:  Target Sequence/siNA sense region
uauggaaaucucuccaacu

SEQ ID NO: 168 - RNA, 19 nt, Artificial Sequence
  Description of Artificial Sequence:  Target Sequence/siNA sense region
uaccucaagagcaaacgug

SEQ ID NO: 169 - RNA, 19 nt, Artificial Sequence
  Description of Artificial Sequence:  Target Sequence/siNA sense region
gacuuauuuuuucucaaca

SEQ ID NO: 170 - RNA, 19 nt, Artificial Sequence
  Description of Artificial Sequence:  Target Sequence/siNA sense region
aaggaugcagcacuacaca

SEQ ID NO: 171 - RNA, 19 nt, Artificial Sequence
  Description of Artificial Sequence:  Target Sequence/siNA sense region
auggagccuaagaaagaaa

SEQ ID NO: 172 - RNA, 19 nt, Artificial Sequence
  Description of Artificial Sequence:  Target Sequence/siNA sense region
aaaauggagccaggccugg

SEQ ID NO: 173 - RNA, 19 nt, Artificial Sequence
  Description of Artificial Sequence:  Target Sequence/siNA sense region
gaacaaggcaagaaaccaa

SEQ ID NO: 174 - RNA, 19 nt, Artificial Sequence
  Description of Artificial Sequence:  Target Sequence/siNA sense region
agacuagauagcgucacca

SEQ ID NO: 175 - RNA, 19 nt, Artificial Sequence
  Description of Artificial Sequence:  Target Sequence/siNA sense region
agcagcgaaagcuuugcga

SEQ ID NO: 176 - RNA, 19 nt, Artificial Sequence
  Description of Artificial Sequence:  Target Sequence/siNA sense region
agcuccggcuuucaggaag

SEQ ID NO: 177 - RNA, 19 nt, Artificial Sequence
  Description of Artificial Sequence:  Target Sequence/siNA sense region
gauaaaagucugagugaug

SEQ ID NO: 178 - RNA, 19 nt, Artificial Sequence
  Description of Artificial Sequence:  Target Sequence/siNA sense region
guugaggaagaggaggauu

SEQ ID NO: 179 - RNA, 19 nt, Artificial Sequence
  Description of Artificial Sequence:  Target Sequence/siNA sense region
ucugacgguuucuacaagg

SEQ ID NO: 180 - RNA, 19 nt, Artificial Sequence
  Description of Artificial Sequence:  Target Sequence/siNA sense region
gagcccaucacuauggaag

SEQ ID NO: 181 - RNA, 19 nt, Artificial Sequence
  Description of Artificial Sequence:  Target Sequence/siNA sense region
gaucugauuucuuacaguu

SEQ ID NO: 182 - RNA, 19 nt, Artificial Sequence
  Description of Artificial Sequence:  Target Sequence/siNA sense region
uuucaaguggccagaggca

SEQ ID NO: 183 - RNA, 19 nt, Artificial Sequence
  Description of Artificial Sequence:  Target Sequence/siNA sense region
auggaguuccugucuucca

SEQ ID NO: 184 - RNA, 19 nt, Artificial Sequence
  Description of Artificial Sequence:  Target Sequence/siNA sense region
agaaagugcauucaucggg

SEQ ID NO: 185 - RNA, 19 nt, Artificial Sequence
  Description of Artificial Sequence:  Target Sequence/siNA sense region
gaccuggcagcgagaaaca

SEQ ID NO: 186 - RNA, 19 nt, Artificial Sequence
  Description of Artificial Sequence:  Target Sequence/siNA sense region
auucuuuuaucugagaaca

SEQ ID NO: 187 - RNA, 19 nt, Artificial Sequence
  Description of Artificial Sequence:  Target Sequence/siNA sense region
aacguggugaagauuugug

SEQ ID NO: 188 - RNA, 19 nt, Artificial Sequence
  Description of Artificial Sequence:  Target Sequence/siNA sense region
gauuuuggccuugcccggg

SEQ ID NO: 189 - RNA, 19 nt, Artificial Sequence
  Description of Artificial Sequence:  Target Sequence/siNA sense region
gauauuuauaagaaccccg

SEQ ID NO: 190 - RNA, 19 nt, Artificial Sequence
  Description of Artificial Sequence:  Target Sequence/siNA sense region
gauuaugugagaaaaggag

SEQ ID NO: 191 - RNA, 19 nt, Artificial Sequence
  Description of Artificial Sequence:  Target Sequence/siNA sense region
gauacucgacuuccucuga

SEQ ID NO: 192 - RNA, 19 nt, Artificial Sequence
  Description of Artificial Sequence:  Target Sequence/siNA sense region
aaauggauggcucccgaau

SEQ ID NO: 193 - RNA, 19 nt, Artificial Sequence
  Description of Artificial Sequence:  Target Sequence/siNA sense region
ucuaucuuugacaaaaucu

SEQ ID NO: 194 - RNA, 19 nt, Artificial Sequence
  Description of Artificial Sequence:  Target Sequence/siNA sense region
uacagcaccaagagcgacg

SEQ ID NO: 195 - RNA, 19 nt, Artificial Sequence
  Description of Artificial Sequence:  Target Sequence/siNA sense region
guguggucuuacggaguau

SEQ ID NO: 196 - RNA, 19 nt, Artificial Sequence
  Description of Artificial Sequence:  Target Sequence/siNA sense region
uugcugugggaaaucuucu

SEQ ID NO: 197 - RNA, 19 nt, Artificial Sequence
  Description of Artificial Sequence:  Target Sequence/siNA sense region
uccuuaggugggucuccau

SEQ ID NO: 198 - RNA, 19 nt, Artificial Sequence
  Description of Artificial Sequence:  Target Sequence/siNA sense region
uacccaggaguacaaaugg

SEQ ID NO: 199 - RNA, 19 nt, Artificial Sequence
  Description of Artificial Sequence:  Target Sequence/siNA sense region
gaugaggacuuuugcaguc

SEQ ID NO: 200 - RNA, 19 nt, Artificial Sequence
  Description of Artificial Sequence:  Target Sequence/siNA sense region
cgccugagggaaggcauga

SEQ ID NO: 201 - RNA, 19 nt, Artificial Sequence
  Description of Artificial Sequence:  Target Sequence/siNA sense region
aggaugagagcuccugagu

SEQ ID NO: 202 - RNA, 19 nt, Artificial Sequence
  Description of Artificial Sequence:  Target Sequence/siNA sense region
uacucuacuccugaaaucu

SEQ ID NO: 203 - RNA, 19 nt, Artificial Sequence
  Description of Artificial Sequence:  Target Sequence/siNA sense region
uaucagaucaugcuggacu

SEQ ID NO: 204 - RNA, 19 nt, Artificial Sequence
  Description of Artificial Sequence:  Target Sequence/siNA sense region
ugcuggcacagagacccaa

SEQ ID NO: 205 - RNA, 19 nt, Artificial Sequence
  Description of Artificial Sequence:  Target Sequence/siNA sense region
aaagaaaggccaagauuug

SEQ ID NO: 206 - RNA, 19 nt, Artificial Sequence
  Description of Artificial Sequence:  Target Sequence/siNA sense region
gcagaacuuguggaaaaac

SEQ ID NO: 207 - RNA, 19 nt, Artificial Sequence
  Description of Artificial Sequence:  Target Sequence/siNA sense region
cuaggugauuugcuucaag

SEQ ID NO: 208 - RNA, 19 nt, Artificial Sequence
  Description of Artificial Sequence:  Target Sequence/siNA sense region
gcaaauguacaacaggaug

SEQ ID NO: 209 - RNA, 19 nt, Artificial Sequence
  Description of Artificial Sequence:  Target Sequence/siNA sense region
gguaaagacuacaucccaa

SEQ ID NO: 210 - RNA, 19 nt, Artificial Sequence
  Description of Artificial Sequence:  Target Sequence/siNA sense region
aucaaugccauacugacag

SEQ ID NO: 211 - RNA, 19 nt, Artificial Sequence
  Description of Artificial Sequence:  Target Sequence/siNA sense region
ggaaauaguggguuuacau

SEQ ID NO: 212 - RNA, 19 nt, Artificial Sequence
  Description of Artificial Sequence:  Target Sequence/siNA sense region
uacucaacuccugccuucu

SEQ ID NO: 213 - RNA, 19 nt, Artificial Sequence
  Description of Artificial Sequence:  Target Sequence/siNA sense region
ucugaggacuucuucaagg

SEQ ID NO: 214 - RNA, 19 nt, Artificial Sequence
  Description of Artificial Sequence:  Target Sequence/siNA sense region
gaaaguauuucagcuccga

SEQ ID NO: 215 - RNA, 19 nt, Artificial Sequence
  Description of Artificial Sequence:  Target Sequence/siNA sense region
aaguuuaauucaggaagcu

SEQ ID NO: 216 - RNA, 19 nt, Artificial Sequence
  Description of Artificial Sequence:  Target Sequence/siNA sense region
ucugaugaugucagauaug

SEQ ID NO: 217 - RNA, 19 nt, Artificial Sequence
  Description of Artificial Sequence:  Target Sequence/siNA sense region
guaaaugcuuucaaguuca

SEQ ID NO: 218 - RNA, 19 nt, Artificial Sequence
  Description of Artificial Sequence:  Target Sequence/siNA sense region
augagccuggaaagaauca

SEQ ID NO: 219 - RNA, 19 nt, Artificial Sequence
  Description of Artificial Sequence:  Target Sequence/siNA sense region
aaaaccuuugaagaacuuu

SEQ ID NO: 220 - RNA, 19 nt, Artificial Sequence
  Description of Artificial Sequence:  Target Sequence/siNA sense region
uuaccgaaugccaccucca

SEQ ID NO: 221 - RNA, 19 nt, Artificial Sequence
  Description of Artificial Sequence:  Target Sequence/siNA sense region
auguuugaugacuaccagg

SEQ ID NO: 222 - RNA, 19 nt, Artificial Sequence
  Description of Artificial Sequence:  Target Sequence/siNA sense region
ggcgacagcagcacucugu

SEQ ID NO: 223 - RNA, 19 nt, Artificial Sequence
  Description of Artificial Sequence:  Target Sequence/siNA sense region
uuggccucucccaugcuga

SEQ ID NO: 224 - RNA, 19 nt, Artificial Sequence
  Description of Artificial Sequence:  Target Sequence/siNA sense region
aagcgcuucaccuggacug

SEQ ID NO: 225 - RNA, 19 nt, Artificial Sequence
  Description of Artificial Sequence:  Target Sequence/siNA sense region
gacagcaaacccaaggccu

SEQ ID NO: 226 - RNA, 19 nt, Artificial Sequence
  Description of Artificial Sequence:  Target Sequence/siNA sense region
ucgcucaagauugacuuga

SEQ ID NO: 227 - RNA, 19 nt, Artificial Sequence
  Description of Artificial Sequence:  Target Sequence/siNA sense region
agaguaaccaguaaaagua

SEQ ID NO: 228 - RNA, 19 nt, Artificial Sequence
  Description of Artificial Sequence:  Target Sequence/siNA sense region
aaggagucggggcugucug

SEQ ID NO: 229 - RNA, 19 nt, Artificial Sequence
  Description of Artificial Sequence:  Target Sequence/siNA sense region
gaugucagcaggcccaguu

SEQ ID NO: 230 - RNA, 19 nt, Artificial Sequence
  Description of Artificial Sequence:  Target Sequence/siNA sense region
uucugccauuccagcugug

SEQ ID NO: 231 - RNA, 19 nt, Artificial Sequence
  Description of Artificial Sequence:  Target Sequence/siNA sense region
gggcacgucagcgaaggca

SEQ ID NO: 232 - RNA, 19 nt, Artificial Sequence
  Description of Artificial Sequence:  Target Sequence/siNA sense region
aagcgcagguucaccuacg

SEQ ID NO: 233 - RNA, 19 nt, Artificial Sequence
  Description of Artificial Sequence:  Target Sequence/siNA sense region
gaccacgcugagcuggaaa

SEQ ID NO: 234 - RNA, 19 nt, Artificial Sequence
  Description of Artificial Sequence:  Target Sequence/siNA sense region
aggaaaaucgcgugcugcu

SEQ ID NO: 235 - RNA, 19 nt, Artificial Sequence
  Description of Artificial Sequence:  Target Sequence/siNA sense region
uccccgcccccagacuaca

SEQ ID NO: 236 - RNA, 19 nt, Artificial Sequence
  Description of Artificial Sequence:  Target Sequence/siNA sense region
aacucggugguccuguacu

SEQ ID NO: 237 - RNA, 19 nt, Artificial Sequence
  Description of Artificial Sequence:  Target Sequence/siNA sense region
uccaccccacccaucuaga

SEQ ID NO: 238 - RNA, 19 nt, Artificial Sequence
  Description of Artificial Sequence:  Target Sequence/siNA sense region
aguuugacacgaagccuua

SEQ ID NO: 239 - RNA, 19 nt, Artificial Sequence
  Description of Artificial Sequence:  Target Sequence/siNA sense region
auuucuagaagcacaugug

SEQ ID NO: 240 - RNA, 19 nt, Artificial Sequence
  Description of Artificial Sequence:  Target Sequence/siNA sense region
guauuuauacccccaggaa

SEQ ID NO: 241 - RNA, 19 nt, Artificial Sequence
  Description of Artificial Sequence:  Target Sequence/siNA sense region
aacuagcuuuugccaguau

SEQ ID NO: 242 - RNA, 19 nt, Artificial Sequence
  Description of Artificial Sequence:  Target Sequence/siNA sense region
uuaugcauauauaaguuua

SEQ ID NO: 243 - RNA, 19 nt, Artificial Sequence
  Description of Artificial Sequence:  Target Sequence/siNA sense region
acaccuuuaucuuuccaug

SEQ ID NO: 244 - RNA, 19 nt, Artificial Sequence
  Description of Artificial Sequence:  Target Sequence/siNA sense region
gggagccagcugcuuuuug

SEQ ID NO: 245 - RNA, 19 nt, Artificial Sequence
  Description of Artificial Sequence:  Target Sequence/siNA sense region
gugauuuuuuuaauagugc

SEQ ID NO: 246 - RNA, 19 nt, Artificial Sequence
  Description of Artificial Sequence:  Target Sequence/siNA sense region
cuuuuuuuuuuugacuaac

SEQ ID NO: 247 - RNA, 19 nt, Artificial Sequence
  Description of Artificial Sequence:  Target Sequence/siNA sense region
caagaauguaacuccagau

SEQ ID NO: 248 - RNA, 19 nt, Artificial Sequence
  Description of Artificial Sequence:  Target Sequence/siNA sense region
uagagaaauagugacaagu

SEQ ID NO: 249 - RNA, 19 nt, Artificial Sequence
  Description of Artificial Sequence:  Target Sequence/siNA sense region
ugaagaacacuacugcuaa

SEQ ID NO: 250 - RNA, 19 nt, Artificial Sequence
  Description of Artificial Sequence:  Target Sequence/siNA sense region
aauccucauguuacucagu

SEQ ID NO: 251 - RNA, 19 nt, Artificial Sequence
  Description of Artificial Sequence:  Target Sequence/siNA sense region
uguuagagaaauccuuccu

SEQ ID NO: 252 - RNA, 19 nt, Artificial Sequence
  Description of Artificial Sequence:  Target Sequence/siNA sense region
uaaacccaaugacuucccu

SEQ ID NO: 253 - RNA, 19 nt, Artificial Sequence
  Description of Artificial Sequence:  Target Sequence/siNA sense region
ugcuccaacccccgccacc

SEQ ID NO: 254 - RNA, 19 nt, Artificial Sequence
  Description of Artificial Sequence:  Target Sequence/siNA sense region
cucagggcacgcaggacca

SEQ ID NO: 255 - RNA, 19 nt, Artificial Sequence
  Description of Artificial Sequence:  Target Sequence/siNA sense region
aguuugauugaggagcugc

SEQ ID NO: 256 - RNA, 19 nt, Artificial Sequence
  Description of Artificial Sequence:  Target Sequence/siNA sense region
cacugaucacccaaugcau

SEQ ID NO: 257 - RNA, 19 nt, Artificial Sequence
  Description of Artificial Sequence:  Target Sequence/siNA sense region
ucacguaccccacugggcc

SEQ ID NO: 258 - RNA, 19 nt, Artificial Sequence
  Description of Artificial Sequence:  Target Sequence/siNA sense region
cagcccugcagcccaaaac

SEQ ID NO: 259 - RNA, 19 nt, Artificial Sequence
  Description of Artificial Sequence:  Target Sequence/siNA sense region
cccagggcaacaagcccgu

SEQ ID NO: 260 - RNA, 19 nt, Artificial Sequence
  Description of Artificial Sequence:  Target Sequence/siNA sense region
uuagccccaggggaucacu

SEQ ID NO: 261 - RNA, 19 nt, Artificial Sequence
  Description of Artificial Sequence:  Target Sequence/siNA sense region
uggcuggccugagcaacau

SEQ ID NO: 262 - RNA, 19 nt, Artificial Sequence
  Description of Artificial Sequence:  Target Sequence/siNA sense region
ucucgggaguccucuagca

SEQ ID NO: 263 - RNA, 19 nt, Artificial Sequence
  Description of Artificial Sequence:  Target Sequence/siNA sense region
aggccuaagacaugugagg

SEQ ID NO: 264 - RNA, 19 nt, Artificial Sequence
  Description of Artificial Sequence:  Target Sequence/siNA sense region
gaggaaaaggaaaaaaagc

SEQ ID NO: 265 - RNA, 19 nt, Artificial Sequence
  Description of Artificial Sequence:  Target Sequence/siNA sense region
caaaaagcaagggagaaaa

SEQ ID NO: 266 - RNA, 19 nt, Artificial Sequence
  Description of Artificial Sequence:  Target Sequence/siNA sense region
agagaaaccgggagaaggc

SEQ ID NO: 267 - RNA, 19 nt, Artificial Sequence
  Description of Artificial Sequence:  Target Sequence/siNA sense region
caugagaaagaauuugaga

SEQ ID NO: 268 - RNA, 19 nt, Artificial Sequence
  Description of Artificial Sequence:  Target Sequence/siNA sense region
acgcaccaugugggcacgg

SEQ ID NO: 269 - RNA, 19 nt, Artificial Sequence
  Description of Artificial Sequence:  Target Sequence/siNA sense region
gagggggacggggcucagc

SEQ ID NO: 270 - RNA, 19 nt, Artificial Sequence
  Description of Artificial Sequence:  Target Sequence/siNA sense region
caaugccauuucaguggcu

SEQ ID NO: 271 - RNA, 19 nt, Artificial Sequence
  Description of Artificial Sequence:  Target Sequence/siNA sense region
uucccagcucugacccuuc

SEQ ID NO: 272 - RNA, 19 nt, Artificial Sequence
  Description of Artificial Sequence:  Target Sequence/siNA sense region
cuacauuugagggcccagc

SEQ ID NO: 273 - RNA, 19 nt, Artificial Sequence
  Description of Artificial Sequence:  Target Sequence/siNA sense region
ccaggagcagauggacagc

SEQ ID NO: 274 - RNA, 19 nt, Artificial Sequence
  Description of Artificial Sequence:  Target Sequence/siNA sense region
cgaugaggggacauuuucu

SEQ ID NO: 275 - RNA, 19 nt, Artificial Sequence
  Description of Artificial Sequence:  Target Sequence/siNA sense region
uggauucugggaggcaaga

SEQ ID NO: 276 - RNA, 19 nt, Artificial Sequence
  Description of Artificial Sequence:  Target Sequence/siNA sense region
aaaaggacaaauaucuuuu

SEQ ID NO: 277 - RNA, 19 nt, Artificial Sequence
  Description of Artificial Sequence:  Target Sequence/siNA sense region
uuuggaacuaaagcaaauu

SEQ ID NO: 278 - RNA, 19 nt, Artificial Sequence
  Description of Artificial Sequence:  Target Sequence/siNA sense region
uuuagaccuuuaccuaugg

SEQ ID NO: 279 - RNA, 19 nt, Artificial Sequence
  Description of Artificial Sequence:  Target Sequence/siNA sense region
gaagugguucuauguccau

SEQ ID NO: 280 - RNA, 19 nt, Artificial Sequence
  Description of Artificial Sequence:  Target Sequence/siNA sense region
uucucauucguggcauguu

SEQ ID NO: 281 - RNA, 19 nt, Artificial Sequence
  Description of Artificial Sequence:  Target Sequence/siNA sense region
uuugauuuguagcacugag

SEQ ID NO: 282 - RNA, 19 nt, Artificial Sequence
  Description of Artificial Sequence:  Target Sequence/siNA sense region
ggguggcacucaacucuga

SEQ ID NO: 283 - RNA, 19 nt, Artificial Sequence
  Description of Artificial Sequence:  Target Sequence/siNA sense region
agcccauacuuuuggcucc

SEQ ID NO: 284 - RNA, 19 nt, Artificial Sequence
  Description of Artificial Sequence:  Target Sequence/siNA sense region
cucuaguaagaugcacuga

SEQ ID NO: 285 - RNA, 19 nt, Artificial Sequence
  Description of Artificial Sequence:  Target Sequence/siNA sense region
aaaacuuagccagaguuag

SEQ ID NO: 286 - RNA, 19 nt, Artificial Sequence
  Description of Artificial Sequence:  Target Sequence/siNA sense region
gguugucuccaggccauga

SEQ ID NO: 287 - RNA, 19 nt, Artificial Sequence
  Description of Artificial Sequence:  Target Sequence/siNA sense region
auggccuuacacugaaaau

SEQ ID NO: 288 - RNA, 19 nt, Artificial Sequence
  Description of Artificial Sequence:  Target Sequence/siNA sense region
ugucacauucuauuuuggg

SEQ ID NO: 289 - RNA, 19 nt, Artificial Sequence
  Description of Artificial Sequence:  Target Sequence/siNA sense region
guauuaauauauaguccag

SEQ ID NO: 290 - RNA, 19 nt, Artificial Sequence
  Description of Artificial Sequence:  Target Sequence/siNA sense region
gacacuuaacucaauuucu

SEQ ID NO: 291 - RNA, 19 nt, Artificial Sequence
  Description of Artificial Sequence:  Target Sequence/siNA sense region
uugguauuauucuguuuug

SEQ ID NO: 292 - RNA, 19 nt, Artificial Sequence
  Description of Artificial Sequence:  Target Sequence/siNA sense region
gcacaguuaguugugaaag

SEQ ID NO: 293 - RNA, 19 nt, Artificial Sequence
  Description of Artificial Sequence:  Target Sequence/siNA sense region
gaaagcugagaagaaugaa

SEQ ID NO: 294 - RNA, 19 nt, Artificial Sequence
  Description of Artificial Sequence:  Target Sequence/siNA sense region
aaaugcaguccugaggaga

SEQ ID NO: 295 - RNA, 19 nt, Artificial Sequence
  Description of Artificial Sequence:  Target Sequence/siNA sense region
aguuuucuccauaucaaaa

SEQ ID NO: 296 - RNA, 19 nt, Artificial Sequence
  Description of Artificial Sequence:  Target Sequence/siNA sense region
acgagggcugauggaggaa

SEQ ID NO: 297 - RNA, 19 nt, Artificial Sequence
  Description of Artificial Sequence:  Target Sequence/siNA sense region
aaaaggucaauaaggucaa

SEQ ID NO: 298 - RNA, 19 nt, Artificial Sequence
  Description of Artificial Sequence:  Target Sequence/siNA sense region
agggaagaccccgucucua

SEQ ID NO: 299 - RNA, 19 nt, Artificial Sequence
  Description of Artificial Sequence:  Target Sequence/siNA sense region
auaccaaccaaaccaauuc

SEQ ID NO: 300 - RNA, 19 nt, Artificial Sequence
  Description of Artificial Sequence:  Target Sequence/siNA sense region
caccaacacaguugggacc

SEQ ID NO: 301 - RNA, 19 nt, Artificial Sequence
  Description of Artificial Sequence:  Target Sequence/siNA sense region
ccaaaacacaggaagucag

SEQ ID NO: 302 - RNA, 19 nt, Artificial Sequence
  Description of Artificial Sequence:  Target Sequence/siNA sense region
gucacguuuccuuuucauu

SEQ ID NO: 303 - RNA, 19 nt, Artificial Sequence
  Description of Artificial Sequence:  Target Sequence/siNA sense region
uuaauggggauuccacuau

SEQ ID NO: 304 - RNA, 19 nt, Artificial Sequence
  Description of Artificial Sequence:  Target Sequence/siNA sense region
ucucacacuaaucugaaag

SEQ ID NO: 305 - RNA, 19 nt, Artificial Sequence
  Description of Artificial Sequence:  Target Sequence/siNA sense region
ggauguggaagagcauuag

SEQ ID NO: 306 - RNA, 19 nt, Artificial Sequence
  Description of Artificial Sequence:  Target Sequence/siNA sense region
gcuggcgcauauuaagcac

SEQ ID NO: 307 - RNA, 19 nt, Artificial Sequence
  Description of Artificial Sequence:  Target Sequence/siNA sense region
cuuuaagcuccuugaguaa

SEQ ID NO: 308 - RNA, 19 nt, Artificial Sequence
  Description of Artificial Sequence:  Target Sequence/siNA sense region
aaaaggugguauguaauuu

SEQ ID NO: 309 - RNA, 19 nt, Artificial Sequence
  Description of Artificial Sequence:  Target Sequence/siNA sense region
uaugcaagguauuucucca

SEQ ID NO: 310 - RNA, 19 nt, Artificial Sequence
  Description of Artificial Sequence:  Target Sequence/siNA sense region
aguugggacucaggauauu

SEQ ID NO: 311 - RNA, 19 nt, Artificial Sequence
  Description of Artificial Sequence:  Target Sequence/siNA sense region
uaguuaaugagccaucacu

SEQ ID NO: 312 - RNA, 19 nt, Artificial Sequence
  Description of Artificial Sequence:  Target Sequence/siNA sense region
uagaagaaaagcccauuuu

SEQ ID NO: 313 - RNA, 19 nt, Artificial Sequence
  Description of Artificial Sequence:  Target Sequence/siNA sense region
ucaacugcuuugaaacuug

SEQ ID NO: 314 - RNA, 19 nt, Artificial Sequence
  Description of Artificial Sequence:  Target Sequence/siNA sense region
gccuggggucugagcauga

SEQ ID NO: 315 - RNA, 19 nt, Artificial Sequence
  Description of Artificial Sequence:  Target Sequence/siNA sense region
augggaauagggagacagg

SEQ ID NO: 316 - RNA, 19 nt, Artificial Sequence
  Description of Artificial Sequence:  Target Sequence/siNA sense region
gguaggaaagggcgccuac

SEQ ID NO: 317 - RNA, 19 nt, Artificial Sequence
  Description of Artificial Sequence:  Target Sequence/siNA sense region
cucuucagggucuaaagau

SEQ ID NO: 318 - RNA, 19 nt, Artificial Sequence
  Description of Artificial Sequence:  Target Sequence/siNA sense region
ucaagugggccuuggaucg

SEQ ID NO: 319 - RNA, 19 nt, Artificial Sequence
  Description of Artificial Sequence:  Target Sequence/siNA sense region
gcuaagcuggcucuguuug

SEQ ID NO: 320 - RNA, 19 nt, Artificial Sequence
  Description of Artificial Sequence:  Target Sequence/siNA sense region
gaugcuauuuaugcaaguu

SEQ ID NO: 321 - RNA, 19 nt, Artificial Sequence
  Description of Artificial Sequence:  Target Sequence/siNA sense region
uagggucuauguauuuagg

SEQ ID NO: 322 - RNA, 19 nt, Artificial Sequence
  Description of Artificial Sequence:  Target Sequence/siNA sense region
gaugcgccuacucuucagg

SEQ ID NO: 323 - RNA, 19 nt, Artificial Sequence
  Description of Artificial Sequence:  Target Sequence/siNA sense region
ggucuaaagaucaaguggg

SEQ ID NO: 324 - RNA, 19 nt, Artificial Sequence
  Description of Artificial Sequence:  Target Sequence/siNA sense region
gccuuggaucgcuaagcug

SEQ ID NO: 325 - RNA, 19 nt, Artificial Sequence
  Description of Artificial Sequence:  Target Sequence/siNA sense region
ggcucuguuugaugcuauu

SEQ ID NO: 326 - RNA, 19 nt, Artificial Sequence
  Description of Artificial Sequence:  Target Sequence/siNA sense region
uuaugcaaguuagggucua

SEQ ID NO: 327 - RNA, 19 nt, Artificial Sequence
  Description of Artificial Sequence:  Target Sequence/siNA sense region
auguauuuaggaugucugc

SEQ ID NO: 328 - RNA, 19 nt, Artificial Sequence
  Description of Artificial Sequence:  Target Sequence/siNA sense region
caccuucugcagccaguca

SEQ ID NO: 329 - RNA, 19 nt, Artificial Sequence
  Description of Artificial Sequence:  Target Sequence/siNA sense region
agaagcuggagaggcaaca

SEQ ID NO: 330 - RNA, 19 nt, Artificial Sequence
  Description of Artificial Sequence:  Target Sequence/siNA sense region
aguggauugcugcuucuug

SEQ ID NO: 331 - RNA, 19 nt, Artificial Sequence
  Description of Artificial Sequence:  Target Sequence/siNA sense region
ggggagaagaguaugcuuc

SEQ ID NO: 332 - RNA, 19 nt, Artificial Sequence
  Description of Artificial Sequence:  Target Sequence/siNA sense region
ccuuuuauccauguaauuu

SEQ ID NO: 333 - RNA, 19 nt, Artificial Sequence
  Description of Artificial Sequence:  Target Sequence/siNA sense region
uaacuguagaaccugagcu

SEQ ID NO: 334 - RNA, 19 nt, Artificial Sequence
  Description of Artificial Sequence:  Target Sequence/siNA sense region
ucuaaguaaccgaagaaug

SEQ ID NO: 335 - RNA, 19 nt, Artificial Sequence
  Description of Artificial Sequence:  Target Sequence/siNA sense region
guaugccucuguucuuaug

SEQ ID NO: 336 - RNA, 19 nt, Artificial Sequence
  Description of Artificial Sequence:  Target Sequence/siNA sense region
gugccacauccuuguuuaa

SEQ ID NO: 337 - RNA, 19 nt, Artificial Sequence
  Description of Artificial Sequence:  Target Sequence/siNA sense region
aaggcucucuguaugaaga

SEQ ID NO: 338 - RNA, 19 nt, Artificial Sequence
  Description of Artificial Sequence:  Target Sequence/siNA sense region
agaugggaccgucaucagc

SEQ ID NO: 339 - RNA, 19 nt, Artificial Sequence
  Description of Artificial Sequence:  Target Sequence/siNA sense region
cacauucccuagugagccu

SEQ ID NO: 340 - RNA, 19 nt, Artificial Sequence
  Description of Artificial Sequence:  Target Sequence/siNA sense region
uacuggcuccuggcagcgg

SEQ ID NO: 341 - RNA, 19 nt, Artificial Sequence
  Description of Artificial Sequence:  Target Sequence/siNA sense region
gcuuuuguggaagacucac

SEQ ID NO: 342 - RNA, 19 nt, Artificial Sequence
  Description of Artificial Sequence:  Target Sequence/siNA sense region
cuagccagaagagaggagu

SEQ ID NO: 343 - RNA, 19 nt, Artificial Sequence
  Description of Artificial Sequence:  Target Sequence/siNA sense region
ugggacaguccucuccacc

SEQ ID NO: 344 - RNA, 19 nt, Artificial Sequence
  Description of Artificial Sequence:  Target Sequence/siNA sense region
caagaucuaaauccaaaca

SEQ ID NO: 345 - RNA, 19 nt, Artificial Sequence
  Description of Artificial Sequence:  Target Sequence/siNA sense region
aaaagcaggcuagagccag

SEQ ID NO: 346 - RNA, 19 nt, Artificial Sequence
  Description of Artificial Sequence:  Target Sequence/siNA sense region
gaagagaggacaaaucuuu

SEQ ID NO: 347 - RNA, 19 nt, Artificial Sequence
  Description of Artificial Sequence:  Target Sequence/siNA sense region
uguuguuccucuucuuuac

SEQ ID NO: 348 - RNA, 19 nt, Artificial Sequence
  Description of Artificial Sequence:  Target Sequence/siNA sense region
cacauacgcaaaccaccug

SEQ ID NO: 349 - RNA, 19 nt, Artificial Sequence
  Description of Artificial Sequence:  Target Sequence/siNA sense region
gugacagcuggcaauuuua

SEQ ID NO: 350 - RNA, 19 nt, Artificial Sequence
  Description of Artificial Sequence:  Target Sequence/siNA sense region
auaaaucagguaacuggaa

SEQ ID NO: 351 - RNA, 19 nt, Artificial Sequence
  Description of Artificial Sequence:  Target Sequence/siNA sense region
aggagguuaaacucagaaa

SEQ ID NO: 352 - RNA, 19 nt, Artificial Sequence
  Description of Artificial Sequence:  Target Sequence/siNA sense region
aaaagaagaccucagucaa

SEQ ID NO: 353 - RNA, 19 nt, Artificial Sequence
  Description of Artificial Sequence:  Target Sequence/siNA sense region
auucucuacuuuuuuuuuu

SEQ ID NO: 354 - RNA, 19 nt, Artificial Sequence
  Description of Artificial Sequence:  Target Sequence/siNA sense region
uuuuuuuccaaaucagaua

SEQ ID NO: 355 - RNA, 19 nt, Artificial Sequence
  Description of Artificial Sequence:  Target Sequence/siNA sense region
aauagcccagcaaauagug

SEQ ID NO: 356 - RNA, 19 nt, Artificial Sequence
  Description of Artificial Sequence:  Target Sequence/siNA sense region
gauaacaaauaaaaccuua

SEQ ID NO: 357 - RNA, 19 nt, Artificial Sequence
  Description of Artificial Sequence:  Target Sequence/siNA sense region
agcuguucaugucuugauu

SEQ ID NO: 358 - RNA, 19 nt, Artificial Sequence
  Description of Artificial Sequence:  Target Sequence/siNA sense region
uucaauaauuaauucuuaa

SEQ ID NO: 359 - RNA, 19 nt, Artificial Sequence
  Description of Artificial Sequence:  Target Sequence/siNA sense region
aucauuaagagaccauaau

SEQ ID NO: 360 - RNA, 19 nt, Artificial Sequence
  Description of Artificial Sequence:  Target Sequence/siNA sense region
uaaauacuccuuuucaaga

SEQ ID NO: 361 - RNA, 19 nt, Artificial Sequence
  Description of Artificial Sequence:  Target Sequence/siNA sense region
agaaaagcaaaaccauuag

SEQ ID NO: 362 - RNA, 19 nt, Artificial Sequence
  Description of Artificial Sequence:  Target Sequence/siNA sense region
gaauuguuacucagcuccu

SEQ ID NO: 363 - RNA, 19 nt, Artificial Sequence
  Description of Artificial Sequence:  Target Sequence/siNA sense region
uucaaacucagguuuguag

SEQ ID NO: 364 - RNA, 19 nt, Artificial Sequence
  Description of Artificial Sequence:  Target Sequence/siNA sense region
gcauacaugaguccaucca

SEQ ID NO: 365 - RNA, 19 nt, Artificial Sequence
  Description of Artificial Sequence:  Target Sequence/siNA sense region
aucagucaaagaaugguuc

SEQ ID NO: 366 - RNA, 19 nt, Artificial Sequence
  Description of Artificial Sequence:  Target Sequence/siNA sense region
ccaucuggagucuuaaugu

SEQ ID NO: 367 - RNA, 19 nt, Artificial Sequence
  Description of Artificial Sequence:  Target Sequence/siNA sense region
uagaaagaaaaauggagac

SEQ ID NO: 368 - RNA, 19 nt, Artificial Sequence
  Description of Artificial Sequence:  Target Sequence/siNA sense region
cuuguaauaaugagcuagu

SEQ ID NO: 369 - RNA, 19 nt, Artificial Sequence
  Description of Artificial Sequence:  Target Sequence/siNA sense region
uuacaaagugcuuguucau

SEQ ID NO: 370 - RNA, 19 nt, Artificial Sequence
  Description of Artificial Sequence:  Target Sequence/siNA sense region
uuaaaauagcacugaaaau

SEQ ID NO: 371 - RNA, 19 nt, Artificial Sequence
  Description of Artificial Sequence:  Target Sequence/siNA sense region
uugaaacaugaauuaacug

SEQ ID NO: 372 - RNA, 19 nt, Artificial Sequence
  Description of Artificial Sequence:  Target Sequence/siNA sense region
gauaauauuccaaucauuu

SEQ ID NO: 373 - RNA, 19 nt, Artificial Sequence
  Description of Artificial Sequence:  Target Sequence/siNA sense region
ugccauuuaugacaaaaau

SEQ ID NO: 374 - RNA, 19 nt, Artificial Sequence
  Description of Artificial Sequence:  Target Sequence/siNA sense region
ugguuggcacuaacaaaga

SEQ ID NO: 375 - RNA, 19 nt, Artificial Sequence
  Description of Artificial Sequence:  Target Sequence/siNA sense region
aacgagcacuuccuuucag

SEQ ID NO: 376 - RNA, 19 nt, Artificial Sequence
  Description of Artificial Sequence:  Target Sequence/siNA sense region
gaguuucugagauaaugua

SEQ ID NO: 377 - RNA, 19 nt, Artificial Sequence
  Description of Artificial Sequence:  Target Sequence/siNA sense region
acguggaacagucugggug

SEQ ID NO: 378 - RNA, 19 nt, Artificial Sequence
  Description of Artificial Sequence:  Target Sequence/siNA sense region
ggaauggggcugaaaccau

SEQ ID NO: 379 - RNA, 19 nt, Artificial Sequence
  Description of Artificial Sequence:  Target Sequence/siNA sense region
ugugcaagucugugucuug

SEQ ID NO: 380 - RNA, 19 nt, Artificial Sequence
  Description of Artificial Sequence:  Target Sequence/siNA sense region
gucaguccaagaagugaca

SEQ ID NO: 381 - RNA, 19 nt, Artificial Sequence
  Description of Artificial Sequence:  Target Sequence/siNA sense region
accgagauguuaauuuuag

SEQ ID NO: 382 - RNA, 19 nt, Artificial Sequence
  Description of Artificial Sequence:  Target Sequence/siNA sense region
gggacccgugccuuguuuc

SEQ ID NO: 383 - RNA, 19 nt, Artificial Sequence
  Description of Artificial Sequence:  Target Sequence/siNA sense region
ccuagcccacaagaaugca

SEQ ID NO: 384 - RNA, 19 nt, Artificial Sequence
  Description of Artificial Sequence:  Target Sequence/siNA sense region
aaacaucaaacagauacuc

SEQ ID NO: 385 - RNA, 19 nt, Artificial Sequence
  Description of Artificial Sequence:  Target Sequence/siNA sense region
cgcuagccucauuuaaauu

SEQ ID NO: 386 - RNA, 19 nt, Artificial Sequence
  Description of Artificial Sequence:  Target Sequence/siNA sense region
ugauuaaaggaggagugca

SEQ ID NO: 387 - RNA, 19 nt, Artificial Sequence
  Description of Artificial Sequence:  Target Sequence/siNA sense region
aucuuuggccgacaguggu

SEQ ID NO: 388 - RNA, 19 nt, Artificial Sequence
  Description of Artificial Sequence:  Target Sequence/siNA sense region
uguaacugugugugugugu

SEQ ID NO: 389 - RNA, 19 nt, Artificial Sequence
  Description of Artificial Sequence:  Target Sequence/siNA sense region
ugugugugugugugugugu

SEQ ID NO: 390 - RNA, 19 nt, Artificial Sequence
  Description of Artificial Sequence:  Target Sequence/siNA sense region
ugugugugugugggugugg

SEQ ID NO: 391 - RNA, 19 nt, Artificial Sequence
  Description of Artificial Sequence:  Target Sequence/siNA sense region
gguguauguguguuuugug

SEQ ID NO: 392 - RNA, 19 nt, Artificial Sequence
  Description of Artificial Sequence:  Target Sequence/siNA sense region
gcauaacuauuuaaggaaa

SEQ ID NO: 393 - RNA, 19 nt, Artificial Sequence
  Description of Artificial Sequence:  Target Sequence/siNA sense region
acuggaauuuuaaaguuac

SEQ ID NO: 394 - RNA, 19 nt, Artificial Sequence
  Description of Artificial Sequence:  Target Sequence/siNA sense region
cuuuuauacaaaccaagaa

SEQ ID NO: 395 - RNA, 19 nt, Artificial Sequence
  Description of Artificial Sequence:  Target Sequence/siNA sense region
auauaugcuacagauauaa

SEQ ID NO: 396 - RNA, 19 nt, Artificial Sequence
  Description of Artificial Sequence:  Target Sequence/siNA sense region
agacagacaugguuugguc

SEQ ID NO: 397 - RNA, 19 nt, Artificial Sequence
  Description of Artificial Sequence:  Target Sequence/siNA sense region
ccuauauuucuagucauga

SEQ ID NO: 398 - RNA, 19 nt, Artificial Sequence
  Description of Artificial Sequence:  Target Sequence/siNA sense region
augaauguauuuuguauac

SEQ ID NO: 399 - RNA, 19 nt, Artificial Sequence
  Description of Artificial Sequence:  Target Sequence/siNA sense region
ccaucuucauauaauauac

SEQ ID NO: 400 - RNA, 19 nt, Artificial Sequence
  Description of Artificial Sequence:  Target Sequence/siNA sense region
cuuaaaaauauuucuuaau

SEQ ID NO: 401 - RNA, 19 nt, Artificial Sequence
  Description of Artificial Sequence:  Target Sequence/siNA sense region
uugggauuuguaaucguac

SEQ ID NO: 402 - RNA, 19 nt, Artificial Sequence
  Description of Artificial Sequence:  Target Sequence/siNA sense region
ccaacuuaauugauaaacu

SEQ ID NO: 403 - RNA, 19 nt, Artificial Sequence
  Description of Artificial Sequence:  Target Sequence/siNA sense region
uuggcaacugcuuuuaugu

SEQ ID NO: 404 - RNA, 19 nt, Artificial Sequence
  Description of Artificial Sequence:  Target Sequence/siNA sense region
uucugucuccuuccauaaa

SEQ ID NO: 405 - RNA, 19 nt, Artificial Sequence
  Description of Artificial Sequence:  Target Sequence/siNA sense region
auuuuucaaaauacuaauu

SEQ ID NO: 406 - RNA, 19 nt, Artificial Sequence
  Description of Artificial Sequence:  Target Sequence/siNA sense region
ucaacaaagaaaaagcucu

SEQ ID NO: 407 - RNA, 19 nt, Artificial Sequence
  Description of Artificial Sequence:  Target Sequence/siNA sense region
uuuuuuuuccuaaaauaaa

SEQ ID NO: 408 - RNA, 19 nt, Artificial Sequence
  Description of Artificial Sequence:  Target Sequence/siNA sense region
acucaaauuuauccuuguu

SEQ ID NO: 409 - RNA, 19 nt, Artificial Sequence
  Description of Artificial Sequence:  Target Sequence/siNA sense region
uuagagcagagaaaaauua

SEQ ID NO: 410 - RNA, 19 nt, Artificial Sequence
  Description of Artificial Sequence:  Target Sequence/siNA sense region
aagaaaaacuuugaaaugg

SEQ ID NO: 411 - RNA, 19 nt, Artificial Sequence
  Description of Artificial Sequence:  Target Sequence/siNA sense region
gucucaaaaaauugcuaaa

SEQ ID NO: 412 - RNA, 19 nt, Artificial Sequence
  Description of Artificial Sequence:  Target Sequence/siNA sense region
auauuuucaauggaaaacu

SEQ ID NO: 413 - RNA, 19 nt, Artificial Sequence
  Description of Artificial Sequence:  Target Sequence/siNA sense region
uaaauguuaguuuagcuga

SEQ ID NO: 414 - RNA, 19 nt, Artificial Sequence
  Description of Artificial Sequence:  Target Sequence/siNA sense region
auuguaugggguuuucgaa

SEQ ID NO: 415 - RNA, 19 nt, Artificial Sequence
  Description of Artificial Sequence:  Target Sequence/siNA sense region
accuuucacuuuuuguuug

SEQ ID NO: 416 - RNA, 19 nt, Artificial Sequence
  Description of Artificial Sequence:  Target Sequence/siNA sense region
guuuuaccuauuucacaac

SEQ ID NO: 417 - RNA, 19 nt, Artificial Sequence
  Description of Artificial Sequence:  Target Sequence/siNA sense region
cuguguaaauugccaauaa

SEQ ID NO: 418 - RNA, 19 nt, Artificial Sequence
  Description of Artificial Sequence:  Target Sequence/siNA sense region
auuccuguccaugaaaaug

SEQ ID NO: 419 - RNA, 19 nt, Artificial Sequence
  Description of Artificial Sequence:  Target Sequence/siNA sense region
gcaaauuauccaguguaga

SEQ ID NO: 420 - RNA, 19 nt, Artificial Sequence
  Description of Artificial Sequence:  Target Sequence/siNA sense region
auauauuugaccaucaccc

SEQ ID NO: 421 - RNA, 19 nt, Artificial Sequence
  Description of Artificial Sequence:  Target Sequence/siNA sense region
cuauggauauuggcuaguu

SEQ ID NO: 422 - RNA, 19 nt, Artificial Sequence
  Description of Artificial Sequence:  Target Sequence/siNA sense region
uuugccuuuauuaagcaaa

SEQ ID NO: 423 - RNA, 19 nt, Artificial Sequence
  Description of Artificial Sequence:  Target Sequence/siNA sense region
auucauuucagccugaaug

SEQ ID NO: 424 - RNA, 19 nt, Artificial Sequence
  Description of Artificial Sequence:  Target Sequence/siNA sense region
gucugccuauauauucucu

SEQ ID NO: 425 - RNA, 19 nt, Artificial Sequence
  Description of Artificial Sequence:  Target Sequence/siNA sense region
ugcucuuuguauucuccuu

SEQ ID NO: 426 - RNA, 19 nt, Artificial Sequence
  Description of Artificial Sequence:  Target Sequence/siNA sense region
uugaacccguuaaaacauc

SEQ ID NO: 427 - RNA, 19 nt, Artificial Sequence
  Description of Artificial Sequence:  Target Sequence/siNA sense region
aaaacauccuguggcacuc

SEQ ID NO: 428 - RNA, 19 nt, Artificial Sequence
  Description of Artificial Sequence:  siNA antisense region
agccgagaggaguguccgc

SEQ ID NO: 429 - RNA, 19 nt, Artificial Sequence
  Description of Artificial Sequence:  siNA antisense region
ccgccgcugccggggagga

SEQ ID NO: 430 - RNA, 19 nt, Artificial Sequence
  Description of Artificial Sequence:  siNA antisense region
ggagcccgcuccgagccgc

SEQ ID NO: 431 - RNA, 19 nt, Artificial Sequence
  Description of Artificial Sequence:  siNA antisense region
ccgcugcacccgagccccg

SEQ ID NO: 432 - RNA, 19 nt, Artificial Sequence
  Description of Artificial Sequence:  siNA antisense region
cgccgccaggcccgcuggc

SEQ ID NO: 433 - RNA, 19 nt, Artificial Sequence
  Description of Artificial Sequence:  siNA antisense region
acuuccccggguaauccuc

SEQ ID NO: 434 - RNA, 19 nt, Artificial Sequence
  Description of Artificial Sequence:  siNA antisense region
uccagccaggagacaacca

SEQ ID NO: 435 - RNA, 19 nt, Artificial Sequence
  Description of Artificial Sequence:  siNA antisense region
gagcgcccgucucgcggcu

SEQ ID NO: 436 - RNA, 19 nt, Artificial Sequence
  Description of Artificial Sequence:  siNA antisense region
ccgccggccccgcgcccug

SEQ ID NO: 437 - RNA, 19 nt, Artificial Sequence
  Description of Artificial Sequence:  siNA antisense region
ccguccucucguucgccgc

SEQ ID NO: 438 - RNA, 19 nt, Artificial Sequence
  Description of Artificial Sequence:  siNA antisense region
cgacccggccgccagaguc

SEQ ID NO: 439 - RNA, 19 nt, Artificial Sequence
  Description of Artificial Sequence:  siNA antisense region
ccgcgcucccccggccaac

SEQ ID NO: 440 - RNA, 19 nt, Artificial Sequence
  Description of Artificial Sequence:  siNA antisense region
ggccugcucgcccggugcc

SEQ ID NO: 441 - RNA, 19 nt, Artificial Sequence
  Description of Artificial Sequence:  siNA antisense region
ccauggugagcgcgacgcg

SEQ ID NO: 442 - RNA, 19 nt, Artificial Sequence
  Description of Artificial Sequence:  siNA antisense region
cggugucccaguagcugac

SEQ ID NO: 443 - RNA, 19 nt, Artificial Sequence
  Description of Artificial Sequence:  siNA antisense region
gcgcgcacagcaggacccc

SEQ ID NO: 444 - RNA, 19 nt, Artificial Sequence
  Description of Artificial Sequence:  siNA antisense region
gaagcagacagcugagcag

SEQ ID NO: 445 - RNA, 19 nt, Artificial Sequence
  Description of Artificial Sequence:  siNA antisense region
cugaacuagauccugugag

SEQ ID NO: 446 - RNA, 19 nt, Artificial Sequence
  Description of Artificial Sequence:  siNA antisense region
gaucuuuuaauuuugaacc

SEQ ID NO: 447 - RNA, 19 nt, Artificial Sequence
  Description of Artificial Sequence:  siNA antisense region
cuuuuaaacucaguucagg

SEQ ID NO: 448 - RNA, 19 nt, Artificial Sequence
  Description of Artificial Sequence:  siNA antisense region
gcaugaugugcugggugcc

SEQ ID NO: 449 - RNA, 19 nt, Artificial Sequence
  Description of Artificial Sequence:  siNA antisense region
gcagugucuggccugcuug

SEQ ID NO: 450 - RNA, 19 nt, Artificial Sequence
  Description of Artificial Sequence:  siNA antisense region
ccccccugcauuggagaug

SEQ ID NO: 451 - RNA, 19 nt, Artificial Sequence
  Description of Artificial Sequence:  siNA antisense region
accauuuaugggcugcuuc

SEQ ID NO: 452 - RNA, 19 nt, Artificial Sequence
  Description of Artificial Sequence:  siNA antisense region
ucaccauuucaggcaaaga

SEQ ID NO: 453 - RNA, 19 nt, Artificial Sequence
  Description of Artificial Sequence:  siNA antisense region
gccuuucgcuuuccuuacu

SEQ ID NO: 454 - RNA, 19 nt, Artificial Sequence
  Description of Artificial Sequence:  siNA antisense region
cagauuuaguuaugcucag

SEQ ID NO: 455 - RNA, 19 nt, Artificial Sequence
  Description of Artificial Sequence:  siNA antisense region
ugccauuucuuccacaggc

SEQ ID NO: 456 - RNA, 19 nt, Artificial Sequence
  Description of Artificial Sequence:  siNA antisense region
aaguacugcagaauuguuu

SEQ ID NO: 457 - RNA, 19 nt, Artificial Sequence
  Description of Artificial Sequence:  siNA antisense region
gagcuguguucaagguuaa

SEQ ID NO: 458 - RNA, 19 nt, Artificial Sequence
  Description of Artificial Sequence:  siNA antisense region
agccagugugguuugcuug

SEQ ID NO: 459 - RNA, 19 nt, Artificial Sequence
  Description of Artificial Sequence:  siNA antisense region
gauauuugcagcuguagaa

SEQ ID NO: 460 - RNA, 19 nt, Artificial Sequence
  Description of Artificial Sequence:  siNA antisense region
uugaaguagguacagcuag

SEQ ID NO: 461 - RNA, 19 nt, Artificial Sequence
  Description of Artificial Sequence:  siNA antisense region
auucuguuuccuucuucuu

SEQ ID NO: 462 - RNA, 19 nt, Artificial Sequence
  Description of Artificial Sequence:  siNA antisense region
uaaauauauagauugcaga

SEQ ID NO: 463 - RNA, 19 nt, Artificial Sequence
  Description of Artificial Sequence:  siNA antisense region
gucuaccuguaucacuaau

SEQ ID NO: 464 - RNA, 19 nt, Artificial Sequence
  Description of Artificial Sequence:  siNA antisense region
uguacaucucuacgaaagg

SEQ ID NO: 465 - RNA, 19 nt, Artificial Sequence
  Description of Artificial Sequence:  siNA antisense region
uaauuucggggauuucacu

SEQ ID NO: 466 - RNA, 19 nt, Artificial Sequence
  Description of Artificial Sequence:  siNA antisense region
uuccuucagucauguguau

SEQ ID NO: 467 - RNA, 19 nt, Artificial Sequence
  Description of Artificial Sequence:  siNA antisense region
agggaaugacgagcucccu

SEQ ID NO: 468 - RNA, 19 nt, Artificial Sequence
  Description of Artificial Sequence:  siNA antisense region
uaggugacguaacccggca

SEQ ID NO: 469 - RNA, 19 nt, Artificial Sequence
  Description of Artificial Sequence:  siNA antisense region
uuaaaguaacagugauguu

SEQ ID NO: 470 - RNA, 19 nt, Artificial Sequence
  Description of Artificial Sequence:  siNA antisense region
ugucaaguggaaacuuuuu

SEQ ID NO: 471 - RNA, 19 nt, Artificial Sequence
  Description of Artificial Sequence:  siNA antisense region
uuccaucagggaucaaagu

SEQ ID NO: 472 - RNA, 19 nt, Artificial Sequence
  Description of Artificial Sequence:  siNA antisense region
ugucccagauuaugcguuu

SEQ ID NO: 473 - RNA, 19 nt, Artificial Sequence
  Description of Artificial Sequence:  siNA antisense region
ugaugaagcccuuucuacu

SEQ ID NO: 474 - RNA, 19 nt, Artificial Sequence
  Description of Artificial Sequence:  siNA antisense region
uguacguugcauuugauau

SEQ ID NO: 475 - RNA, 19 nt, Artificial Sequence
  Description of Artificial Sequence:  siNA antisense region
ucagaagcccuauuucuuu

SEQ ID NO: 476 - RNA, 19 nt, Artificial Sequence
  Description of Artificial Sequence:  siNA antisense region
ugacuguugcuucacaggu

SEQ ID NO: 477 - RNA, 19 nt, Artificial Sequence
  Description of Artificial Sequence:  siNA antisense region
ucuuauacaaaugcccauu

SEQ ID NO: 478 - RNA, 19 nt, Artificial Sequence
  Description of Artificial Sequence:  siNA antisense region
gaugugugagauaguuugu

SEQ ID NO: 479 - RNA, 19 nt, Artificial Sequence
  Description of Artificial Sequence:  siNA antisense region
ugauuguauugguuugucg

SEQ ID NO: 480 - RNA, 19 nt, Artificial Sequence
  Description of Artificial Sequence:  siNA antisense region
ugcuuauuuggacaucuau

SEQ ID NO: 481 - RNA, 19 nt, Artificial Sequence
  Description of Artificial Sequence:  siNA antisense region
auuugacugggcguggugu

SEQ ID NO: 482 - RNA, 19 nt, Artificial Sequence
  Description of Artificial Sequence:  siNA antisense region
gaguauggccucuaaguaa

SEQ ID NO: 483 - RNA, 19 nt, Artificial Sequence
  Description of Artificial Sequence:  siNA antisense region
caguacaauugaggacaag

SEQ ID NO: 484 - RNA, 19 nt, Artificial Sequence
  Description of Artificial Sequence:  siNA antisense region
uguucaagggagugguagc

SEQ ID NO: 485 - RNA, 19 nt, Artificial Sequence
  Description of Artificial Sequence:  siNA antisense region
aggucauuugaacucucgu

SEQ ID NO: 486 - RNA, 19 nt, Artificial Sequence
  Description of Artificial Sequence:  siNA antisense region
uuucaucaggguaacucca

SEQ ID NO: 487 - RNA, 19 nt, Artificial Sequence
  Description of Artificial Sequence:  siNA antisense region
cggaagcucucuuauuuuu

SEQ ID NO: 488 - RNA, 19 nt, Artificial Sequence
  Description of Artificial Sequence:  siNA antisense region
ggucaauucgucgccuuac

SEQ ID NO: 489 - RNA, 19 nt, Artificial Sequence
  Description of Artificial Sequence:  siNA antisense region
uggcaugggaauugcuuug

SEQ ID NO: 490 - RNA, 19 nt, Artificial Sequence
  Description of Artificial Sequence:  siNA antisense region
gaacacuguagaauauguu

SEQ ID NO: 491 - RNA, 19 nt, Artificial Sequence
  Description of Artificial Sequence:  siNA antisense region
gcauuuugucaauaguaag

SEQ ID NO: 492 - RNA, 19 nt, Artificial Sequence
  Description of Artificial Sequence:  siNA antisense region
guccuuugucuuuguucug

SEQ ID NO: 493 - RNA, 19 nt, Artificial Sequence
  Description of Artificial Sequence:  siNA antisense region
uuacacgacaaguauaaag

SEQ ID NO: 494 - RNA, 19 nt, Artificial Sequence
  Description of Artificial Sequence:  siNA antisense region
ugaaugaugguccacuccu

SEQ ID NO: 495 - RNA, 19 nt, Artificial Sequence
  Description of Artificial Sequence:  siNA antisense region
cugagguguuaacagauuu

SEQ ID NO: 496 - RNA, 19 nt, Artificial Sequence
  Description of Artificial Sequence:  siNA antisense region
cuuuaucauauauaugcac

SEQ ID NO: 497 - RNA, 19 nt, Artificial Sequence
  Description of Artificial Sequence:  siNA antisense region
guuucacagugaugaaugc

SEQ ID NO: 498 - RNA, 19 nt, Artificial Sequence
  Description of Artificial Sequence:  siNA antisense region
gcaccugcuguuuucgaug

SEQ ID NO: 499 - RNA, 19 nt, Artificial Sequence
  Description of Artificial Sequence:  siNA antisense region
ugccagcuacgguuucaag

SEQ ID NO: 500 - RNA, 19 nt, Artificial Sequence
  Description of Artificial Sequence:  siNA antisense region
agagccgguaagaccgcuu

SEQ ID NO: 501 - RNA, 19 nt, Artificial Sequence
  Description of Artificial Sequence:  siNA antisense region
augccuucacuuucauaga

SEQ ID NO: 502 - RNA, 19 nt, Artificial Sequence
  Description of Artificial Sequence:  siNA antisense region
caacuuccggcgagggaaa

SEQ ID NO: 503 - RNA, 19 nt, Artificial Sequence
  Description of Artificial Sequence:  siNA antisense region
acccaucuuuuaaccauac

SEQ ID NO: 504 - RNA, 19 nt, Artificial Sequence
  Description of Artificial Sequence:  siNA antisense region
auuucucagucgcagguaa

SEQ ID NO: 505 - RNA, 19 nt, Artificial Sequence
  Description of Artificial Sequence:  siNA antisense region
gagucaaauagcgagcaga

SEQ ID NO: 506 - RNA, 19 nt, Artificial Sequence
  Description of Artificial Sequence:  siNA antisense region
uaauuaacgaguagccacg

SEQ ID NO: 507 - RNA, 19 nt, Artificial Sequence
  Description of Artificial Sequence:  siNA antisense region
cuucaguuacguccuugau

SEQ ID NO: 508 - RNA, 19 nt, Artificial Sequence
  Description of Artificial Sequence:  siNA antisense region
uauaauucccugcauccuc

SEQ ID NO: 509 - RNA, 19 nt, Artificial Sequence
  Description of Artificial Sequence:  siNA antisense region
uuaugcucagcaagauugu

SEQ ID NO: 510 - RNA, 19 nt, Artificial Sequence
  Description of Artificial Sequence:  siNA antisense region
uaaacacauuugacuguuu

SEQ ID NO: 511 - RNA, 19 nt, Artificial Sequence
  Description of Artificial Sequence:  siNA antisense region
gaguggcagugagguuuuu

SEQ ID NO: 512 - RNA, 19 nt, Artificial Sequence
  Description of Artificial Sequence:  siNA antisense region
guuucacauugacaauuag

SEQ ID NO: 513 - RNA, 19 nt, Artificial Sequence
  Description of Artificial Sequence:  siNA antisense region
ccuuuucguaaaucugggg

SEQ ID NO: 514 - RNA, 19 nt, Artificial Sequence
  Description of Artificial Sequence:  siNA antisense region
cuggaaacgaugacacggc

SEQ ID NO: 515 - RNA, 19 nt, Artificial Sequence
  Description of Artificial Sequence:  siNA antisense region
guggguagagagccggguc

SEQ ID NO: 516 - RNA, 19 nt, Artificial Sequence
  Description of Artificial Sequence:  siNA antisense region
ggauuugucugcugcccag

SEQ ID NO: 517 - RNA, 19 nt, Artificial Sequence
  Description of Artificial Sequence:  siNA antisense region
cauaugcgguacaagucag

SEQ ID NO: 518 - RNA, 19 nt, Artificial Sequence
  Description of Artificial Sequence:  siNA antisense region
uuguagguugagggauacc

SEQ ID NO: 519 - RNA, 19 nt, Artificial Sequence
  Description of Artificial Sequence:  siNA antisense region
ggugccagaaccacuugau

SEQ ID NO: 520 - RNA, 19 nt, Artificial Sequence
  Description of Artificial Sequence:  siNA antisense region
aaugauuaugguuacaggg

SEQ ID NO: 521 - RNA, 19 nt, Artificial Sequence
  Description of Artificial Sequence:  siNA antisense region
agucacaccuugcuucgga

SEQ ID NO: 522 - RNA, 19 nt, Artificial Sequence
  Description of Artificial Sequence:  siNA antisense region
cuucauuauuggaacaaaa

SEQ ID NO: 523 - RNA, 19 nt, Artificial Sequence
  Description of Artificial Sequence:  siNA antisense region
cauccaggauaaaggacuc

SEQ ID NO: 524 - RNA, 19 nt, Artificial Sequence
  Description of Artificial Sequence:  siNA antisense region
uucccauguugcugucagc

SEQ ID NO: 525 - RNA, 19 nt, Artificial Sequence
  Description of Artificial Sequence:  siNA antisense region
ugaugcucucaauucuguu

SEQ ID NO: 526 - RNA, 19 nt, Artificial Sequence
  Description of Artificial Sequence:  siNA antisense region
uuauugccaugcgcugagu

SEQ ID NO: 527 - RNA, 19 nt, Artificial Sequence
  Description of Artificial Sequence:  siNA antisense region
ucuuauucuuuccuucuau

SEQ ID NO: 528 - RNA, 19 nt, Artificial Sequence
  Description of Artificial Sequence:  siNA antisense region
caaccaaggugcuagccau

SEQ ID NO: 529 - RNA, 19 nt, Artificial Sequence
  Description of Artificial Sequence:  siNA antisense region
aaauucuagagucagccac

SEQ ID NO: 530 - RNA, 19 nt, Artificial Sequence
  Description of Artificial Sequence:  siNA antisense region
ugcaaauguagauuccaga

SEQ ID NO: 531 - RNA, 19 nt, Artificial Sequence
  Description of Artificial Sequence:  siNA antisense region
caacuuuauuggaagcuau

SEQ ID NO: 532 - RNA, 19 nt, Artificial Sequence
  Description of Artificial Sequence:  siNA antisense region
uguuucuucccacaguccc

SEQ ID NO: 533 - RNA, 19 nt, Artificial Sequence
  Description of Artificial Sequence:  siNA antisense region
cugugauauaaaagcuuau

SEQ ID NO: 534 - RNA, 19 nt, Artificial Sequence
  Description of Artificial Sequence:  siNA antisense region
gaaacccauuuggcacauc

SEQ ID NO: 535 - RNA, 19 nt, Artificial Sequence
  Description of Artificial Sequence:  siNA antisense region
uuuuuuccaaguuaacaug

SEQ ID NO: 536 - RNA, 19 nt, Artificial Sequence
  Description of Artificial Sequence:  siNA antisense region
ccucuccuuccgucggcau

SEQ ID NO: 537 - RNA, 19 nt, Artificial Sequence
  Description of Artificial Sequence:  siNA antisense region
ugcaagacaguuucagguc

SEQ ID NO: 538 - RNA, 19 nt, Artificial Sequence
  Description of Artificial Sequence:  siNA antisense region
auaagaacuuguuaacugu

SEQ ID NO: 539 - RNA, 19 nt, Artificial Sequence
  Description of Artificial Sequence:  siNA antisense region
uccaaguaacgucucugua

SEQ ID NO: 540 - RNA, 19 nt, Artificial Sequence
  Description of Artificial Sequence:  siNA antisense region
uaacuguccgcaguaaaau

SEQ ID NO: 541 - RNA, 19 nt, Artificial Sequence
  Description of Artificial Sequence:  siNA antisense region
agugcauuguucuguuauu

SEQ ID NO: 542 - RNA, 19 nt, Artificial Sequence
  Description of Artificial Sequence:  siNA antisense region
uuugcuugcuaauacugua

SEQ ID NO: 543 - RNA, 19 nt, Artificial Sequence
  Description of Artificial Sequence:  siNA antisense region
ccuuagugauggccauuuu

SEQ ID NO: 544 - RNA, 19 nt, Artificial Sequence
  Description of Artificial Sequence:  siNA antisense region
uaagagugauggagugcuc

SEQ ID NO: 545 - RNA, 19 nt, Artificial Sequence
  Description of Artificial Sequence:  siNA antisense region
cauucaugaugguaagauu

SEQ ID NO: 546 - RNA, 19 nt, Artificial Sequence
  Description of Artificial Sequence:  siNA antisense region
cugaaucuugcagggaaac

SEQ ID NO: 547 - RNA, 19 nt, Artificial Sequence
  Description of Artificial Sequence:  siNA antisense region
cucugcaggcauaggugcc

SEQ ID NO: 548 - RNA, 19 nt, Artificial Sequence
  Description of Artificial Sequence:  siNA antisense region
cuguguauacauuccuggc

SEQ ID NO: 549 - RNA, 19 nt, Artificial Sequence
  Description of Artificial Sequence:  siNA antisense region
ucuggaggauuucuucccc

SEQ ID NO: 550 - RNA, 19 nt, Artificial Sequence
  Description of Artificial Sequence:  siNA antisense region
ugauuguaauuucuuucuu

SEQ ID NO: 551 - RNA, 19 nt, Artificial Sequence
  Description of Artificial Sequence:  siNA antisense region
auggugcuuccugaucucu

SEQ ID NO: 552 - RNA, 19 nt, Artificial Sequence
  Description of Artificial Sequence:  siNA antisense region
ugagguuucgcaggaggua

SEQ ID NO: 553 - RNA, 19 nt, Artificial Sequence
  Description of Artificial Sequence:  siNA antisense region
uggccacugugugaucacu

SEQ ID NO: 554 - RNA, 19 nt, Artificial Sequence
  Description of Artificial Sequence:  siNA antisense region
aagugguggaacugcugau

SEQ ID NO: 555 - RNA, 19 nt, Artificial Sequence
  Description of Artificial Sequence:  siNA antisense region
cauuagcaugacagucuaa

SEQ ID NO: 556 - RNA, 19 nt, Artificial Sequence
  Description of Artificial Sequence:  siNA antisense region
ucugaggcucggggacacc

SEQ ID NO: 557 - RNA, 19 nt, Artificial Sequence
  Description of Artificial Sequence:  siNA antisense region
uguuuuuaaaccaagugau

SEQ ID NO: 558 - RNA, 19 nt, Artificial Sequence
  Description of Artificial Sequence:  siNA antisense region
cuuguuguauuuugugguu

SEQ ID NO: 559 - RNA, 19 nt, Artificial Sequence
  Description of Artificial Sequence:  siNA antisense region
cuaaaauaauuccaggcuc

SEQ ID NO: 560 - RNA, 19 nt, Artificial Sequence
  Description of Artificial Sequence:  siNA antisense region
gcgugcugcuuccuggucc

SEQ ID NO: 561 - RNA, 19 nt, Artificial Sequence
  Description of Artificial Sequence:  siNA antisense region
ugacucuuucaauaaacag

SEQ ID NO: 562 - RNA, 19 nt, Artificial Sequence
  Description of Artificial Sequence:  siNA antisense region
caccuucauccucuucugu

SEQ ID NO: 563 - RNA, 19 nt, Artificial Sequence
  Description of Artificial Sequence:  siNA antisense region
uggcuuugcagugauagac

SEQ ID NO: 564 - RNA, 19 nt, Artificial Sequence
  Description of Artificial Sequence:  siNA antisense region
cagagcccuucugguuggu

SEQ ID NO: 565 - RNA, 19 nt, Artificial Sequence
  Description of Artificial Sequence:  siNA antisense region
gguaugcugaacuuuccac

SEQ ID NO: 566 - RNA, 19 nt, Artificial Sequence
  Description of Artificial Sequence:  siNA antisense region
agguuccuugaacagugag

SEQ ID NO: 567 - RNA, 19 nt, Artificial Sequence
  Description of Artificial Sequence:  siNA antisense region
ccagauuagacuuguccga

SEQ ID NO: 568 - RNA, 19 nt, Artificial Sequence
  Description of Artificial Sequence:  siNA antisense region
auguuagagugaucagcuc

SEQ ID NO: 569 - RNA, 19 nt, Artificial Sequence
  Description of Artificial Sequence:  siNA antisense region
ucgcagccacacaggugca

SEQ ID NO: 570 - RNA, 19 nt, Artificial Sequence
  Description of Artificial Sequence:  siNA antisense region
auaggagccagaagagagu

SEQ ID NO: 571 - RNA, 19 nt, Artificial Sequence
  Description of Artificial Sequence:  siNA antisense region
uucggauaaggaggguuaa

SEQ ID NO: 572 - RNA, 19 nt, Artificial Sequence
  Description of Artificial Sequence:  siNA antisense region
aagaagaccuuuucauuuu

SEQ ID NO: 573 - RNA, 19 nt, Artificial Sequence
  Description of Artificial Sequence:  siNA antisense region
agucagucuuuauuucaga

SEQ ID NO: 574 - RNA, 19 nt, Artificial Sequence
  Description of Artificial Sequence:  siNA antisense region
ccauuauaauugauaggua

SEQ ID NO: 575 - RNA, 19 nt, Artificial Sequence
  Description of Artificial Sequence:  siNA antisense region
aaggaacuucaucuggguc

SEQ ID NO: 576 - RNA, 19 nt, Artificial Sequence
  Description of Artificial Sequence:  siNA antisense region
gcucacacugcucauccaa

SEQ ID NO: 577 - RNA, 19 nt, Artificial Sequence
  Description of Artificial Sequence:  siNA antisense region
uggcaucauaagggagccg

SEQ ID NO: 578 - RNA, 19 nt, Artificial Sequence
  Description of Artificial Sequence:  siNA antisense region
gggcaaacucccacuugcu

SEQ ID NO: 579 - RNA, 19 nt, Artificial Sequence
  Description of Artificial Sequence:  siNA antisense region
ccaguuuaagucucucccg

SEQ ID NO: 580 - RNA, 19 nt, Artificial Sequence
  Description of Artificial Sequence:  siNA antisense region
cucuuccaagugauuugcc

SEQ ID NO: 581 - RNA, 19 nt, Artificial Sequence
  Description of Artificial Sequence:  siNA antisense region
ccacuuuuccaaaagcccc

SEQ ID NO: 582 - RNA, 19 nt, Artificial Sequence
  Description of Artificial Sequence:  siNA antisense region
caaaugcugaugcuugaac

SEQ ID NO: 583 - RNA, 19 nt, Artificial Sequence
  Description of Artificial Sequence:  siNA antisense region
uaggugauuucuuaaugcc

SEQ ID NO: 584 - RNA, 19 nt, Artificial Sequence
  Description of Artificial Sequence:  siNA antisense region
cagccacaguccggcacgu

SEQ ID NO: 585 - RNA, 19 nt, Artificial Sequence
  Description of Artificial Sequence:  siNA antisense region
ccucuuucagcauuuucac

SEQ ID NO: 586 - RNA, 19 nt, Artificial Sequence
  Description of Artificial Sequence:  siNA antisense region
acucgcuggccguggcccc

SEQ ID NO: 587 - RNA, 19 nt, Artificial Sequence
  Description of Artificial Sequence:  siNA antisense region
cagucaucagagcuuugua

SEQ ID NO: 588 - RNA, 19 nt, Artificial Sequence
  Description of Artificial Sequence:  siNA antisense region
gggucaagauuuuuagcuc

SEQ ID NO: 589 - RNA, 19 nt, Artificial Sequence
  Description of Artificial Sequence:  siNA antisense region
ucagaugguggccaaugug

SEQ ID NO: 590 - RNA, 19 nt, Artificial Sequence
  Description of Artificial Sequence:  siNA antisense region
ccagcagguuaaccacguu

SEQ ID NO: 591 - RNA, 19 nt, Artificial Sequence
  Description of Artificial Sequence:  siNA antisense region
cuugcuuggugcaggcucc

SEQ ID NO: 592 - RNA, 19 nt, Artificial Sequence
  Description of Artificial Sequence:  siNA antisense region
ucaccaucagaggcccucc

SEQ ID NO: 593 - RNA, 19 nt, Artificial Sequence
  Description of Artificial Sequence:  siNA antisense region
auuugcaguauucaacaau

SEQ ID NO: 594 - RNA, 19 nt, Artificial Sequence
  Description of Artificial Sequence:  siNA antisense region
aguuggagagauuuccaua

SEQ ID NO: 595 - RNA, 19 nt, Artificial Sequence
  Description of Artificial Sequence:  siNA antisense region
cacguuugcucuugaggua

SEQ ID NO: 596 - RNA, 19 nt, Artificial Sequence
  Description of Artificial Sequence:  siNA antisense region
uguugagaaaaaauaaguc

SEQ ID NO: 597 - RNA, 19 nt, Artificial Sequence
  Description of Artificial Sequence:  siNA antisense region
uguguagugcugcauccuu

SEQ ID NO: 598 - RNA, 19 nt, Artificial Sequence
  Description of Artificial Sequence:  siNA antisense region
uuucuuucuuaggcuccau

SEQ ID NO: 599 - RNA, 19 nt, Artificial Sequence
  Description of Artificial Sequence:  siNA antisense region
ccaggccuggcuccauuuu

SEQ ID NO: 600 - RNA, 19 nt, Artificial Sequence
  Description of Artificial Sequence:  siNA antisense region
uugguuucuugccuuguuc

SEQ ID NO: 601 - RNA, 19 nt, Artificial Sequence
  Description of Artificial Sequence:  siNA antisense region
uggugacgcuaucuagucu

SEQ ID NO: 602 - RNA, 19 nt, Artificial Sequence
  Description of Artificial Sequence:  siNA antisense region
ucgcaaagcuuucgcugcu

SEQ ID NO: 603 - RNA, 19 nt, Artificial Sequence
  Description of Artificial Sequence:  siNA antisense region
cuuccugaaagccggagcu

SEQ ID NO: 604 - RNA, 19 nt, Artificial Sequence
  Description of Artificial Sequence:  siNA antisense region
caucacucagacuuuuauc

SEQ ID NO: 605 - RNA, 19 nt, Artificial Sequence
  Description of Artificial Sequence:  siNA antisense region
aauccuccucuuccucaac

SEQ ID NO: 606 - RNA, 19 nt, Artificial Sequence
  Description of Artificial Sequence:  siNA antisense region
ccuuguagaaaccgucaga

SEQ ID NO: 607 - RNA, 19 nt, Artificial Sequence
  Description of Artificial Sequence:  siNA antisense region
cuuccauagugaugggcuc

SEQ ID NO: 608 - RNA, 19 nt, Artificial Sequence
  Description of Artificial Sequence:  siNA antisense region
aacuguaagaaaucagauc

SEQ ID NO: 609 - RNA, 19 nt, Artificial Sequence
  Description of Artificial Sequence:  siNA antisense region
ugccucuggccacuugaaa

SEQ ID NO: 610 - RNA, 19 nt, Artificial Sequence
  Description of Artificial Sequence:  siNA antisense region
uggaagacaggaacuccau

SEQ ID NO: 611 - RNA, 19 nt, Artificial Sequence
  Description of Artificial Sequence:  siNA antisense region
cccgaugaaugcacuuucu

SEQ ID NO: 612 - RNA, 19 nt, Artificial Sequence
  Description of Artificial Sequence:  siNA antisense region
uguuucucgcugccagguc

SEQ ID NO: 613 - RNA, 19 nt, Artificial Sequence
  Description of Artificial Sequence:  siNA antisense region
uguucucagauaaaagaau

SEQ ID NO: 614 - RNA, 19 nt, Artificial Sequence
  Description of Artificial Sequence:  siNA antisense region
cacaaaucuucaccacguu

SEQ ID NO: 615 - RNA, 19 nt, Artificial Sequence
  Description of Artificial Sequence:  siNA antisense region
cccgggcaaggccaaaauc

SEQ ID NO: 616 - RNA, 19 nt, Artificial Sequence
  Description of Artificial Sequence:  siNA antisense region
cgggguucuuauaaauauc

SEQ ID NO: 617 - RNA, 19 nt, Artificial Sequence
  Description of Artificial Sequence:  siNA antisense region
cuccuuuucucacauaauc

SEQ ID NO: 618 - RNA, 19 nt, Artificial Sequence
  Description of Artificial Sequence:  siNA antisense region
ucagaggaagucgaguauc

SEQ ID NO: 619 - RNA, 19 nt, Artificial Sequence
  Description of Artificial Sequence:  siNA antisense region
auucgggagccauccauuu

SEQ ID NO: 620 - RNA, 19 nt, Artificial Sequence
  Description of Artificial Sequence:  siNA antisense region
agauuuugucaaagauaga

SEQ ID NO: 621 - RNA, 19 nt, Artificial Sequence
  Description of Artificial Sequence:  siNA antisense region
cgucgcucuuggugcugua

SEQ ID NO: 622 - RNA, 19 nt, Artificial Sequence
  Description of Artificial Sequence:  siNA antisense region
auacuccguaagaccacac

SEQ ID NO: 623 - RNA, 19 nt, Artificial Sequence
  Description of Artificial Sequence:  siNA antisense region
agaagauuucccacagcaa

SEQ ID NO: 624 - RNA, 19 nt, Artificial Sequence
  Description of Artificial Sequence:  siNA antisense region
auggagacccaccuaagga

SEQ ID NO: 625 - RNA, 19 nt, Artificial Sequence
  Description of Artificial Sequence:  siNA antisense region
ccauuuguacuccugggua

SEQ ID NO: 626 - RNA, 19 nt, Artificial Sequence
  Description of Artificial Sequence:  siNA antisense region
gacugcaaaaguccucauc

SEQ ID NO: 627 - RNA, 19 nt, Artificial Sequence
  Description of Artificial Sequence:  siNA antisense region
ucaugccuucccucaggcg

SEQ ID NO: 628 - RNA, 19 nt, Artificial Sequence
  Description of Artificial Sequence:  siNA antisense region
acucaggagcucucauccu

SEQ ID NO: 629 - RNA, 19 nt, Artificial Sequence
  Description of Artificial Sequence:  siNA antisense region
agauuucaggaguagagua

SEQ ID NO: 630 - RNA, 19 nt, Artificial Sequence
  Description of Artificial Sequence:  siNA antisense region
aguccagcaugaucugaua

SEQ ID NO: 631 - RNA, 19 nt, Artificial Sequence
  Description of Artificial Sequence:  siNA antisense region
uugggucucugugccagca

SEQ ID NO: 632 - RNA, 19 nt, Artificial Sequence
  Description of Artificial Sequence:  siNA antisense region
caaaucuuggccuuucuuu

SEQ ID NO: 633 - RNA, 19 nt, Artificial Sequence
  Description of Artificial Sequence:  siNA antisense region
guuuuuccacaaguucugc

SEQ ID NO: 634 - RNA, 19 nt, Artificial Sequence
  Description of Artificial Sequence:  siNA antisense region
cuugaagcaaaucaccuag

SEQ ID NO: 635 - RNA, 19 nt, Artificial Sequence
  Description of Artificial Sequence:  siNA antisense region
cauccuguuguacauuugc

SEQ ID NO: 636 - RNA, 19 nt, Artificial Sequence
  Description of Artificial Sequence:  siNA antisense region
uugggauguagucuuuacc

SEQ ID NO: 637 - RNA, 19 nt, Artificial Sequence
  Description of Artificial Sequence:  siNA antisense region
cugucaguauggcauugau

SEQ ID NO: 638 - RNA, 19 nt, Artificial Sequence
  Description of Artificial Sequence:  siNA antisense region
auguaaacccacuauuucc

SEQ ID NO: 639 - RNA, 19 nt, Artificial Sequence
  Description of Artificial Sequence:  siNA antisense region
agaaggcaggaguugagua

SEQ ID NO: 640 - RNA, 19 nt, Artificial Sequence
  Description of Artificial Sequence:  siNA antisense region
ccuugaagaaguccucaga

SEQ ID NO: 641 - RNA, 19 nt, Artificial Sequence
  Description of Artificial Sequence:  siNA antisense region
ucggagcugaaauacuuuc

SEQ ID NO: 642 - RNA, 19 nt, Artificial Sequence
  Description of Artificial Sequence:  siNA antisense region
agcuuccugaauuaaacuu

SEQ ID NO: 643 - RNA, 19 nt, Artificial Sequence
  Description of Artificial Sequence:  siNA antisense region
cauaucugacaucaucaga

SEQ ID NO: 644 - RNA, 19 nt, Artificial Sequence
  Description of Artificial Sequence:  siNA antisense region
ugaacuugaaagcauuuac

SEQ ID NO: 645 - RNA, 19 nt, Artificial Sequence
  Description of Artificial Sequence:  siNA antisense region
ugauucuuuccaggcucau

SEQ ID NO: 646 - RNA, 19 nt, Artificial Sequence
  Description of Artificial Sequence:  siNA antisense region
aaaguucuucaaagguuuu

SEQ ID NO: 647 - RNA, 19 nt, Artificial Sequence
  Description of Artificial Sequence:  siNA antisense region
uggagguggcauucgguaa

SEQ ID NO: 648 - RNA, 19 nt, Artificial Sequence
  Description of Artificial Sequence:  siNA antisense region
ccugguagucaucaaacau

SEQ ID NO: 649 - RNA, 19 nt, Artificial Sequence
  Description of Artificial Sequence:  siNA antisense region
acagagugcugcugucgcc

SEQ ID NO: 650 - RNA, 19 nt, Artificial Sequence
  Description of Artificial Sequence:  siNA antisense region
ucagcaugggagaggccaa

SEQ ID NO: 651 - RNA, 19 nt, Artificial Sequence
  Description of Artificial Sequence:  siNA antisense region
caguccaggugaagcgcuu

SEQ ID NO: 652 - RNA, 19 nt, Artificial Sequence
  Description of Artificial Sequence:  siNA antisense region
aggccuuggguuugcuguc

SEQ ID NO: 653 - RNA, 19 nt, Artificial Sequence
  Description of Artificial Sequence:  siNA antisense region
ucaagucaaucuugagcga

SEQ ID NO: 654 - RNA, 19 nt, Artificial Sequence
  Description of Artificial Sequence:  siNA antisense region
uacuuuuacugguuacucu

SEQ ID NO: 655 - RNA, 19 nt, Artificial Sequence
  Description of Artificial Sequence:  siNA antisense region
cagacagccccgacuccuu

SEQ ID NO: 656 - RNA, 19 nt, Artificial Sequence
  Description of Artificial Sequence:  siNA antisense region
aacugggccugcugacauc

SEQ ID NO: 657 - RNA, 19 nt, Artificial Sequence
  Description of Artificial Sequence:  siNA antisense region
cacagcuggaauggcagaa

SEQ ID NO: 658 - RNA, 19 nt, Artificial Sequence
  Description of Artificial Sequence:  siNA antisense region
ugccuucgcugacgugccc

SEQ ID NO: 659 - RNA, 19 nt, Artificial Sequence
  Description of Artificial Sequence:  siNA antisense region
cguaggugaaccugcgcuu

SEQ ID NO: 660 - RNA, 19 nt, Artificial Sequence
  Description of Artificial Sequence:  siNA antisense region
uuuccagcucagcgugguc

SEQ ID NO: 661 - RNA, 19 nt, Artificial Sequence
  Description of Artificial Sequence:  siNA antisense region
agcagcacgcgauuuuccu

SEQ ID NO: 662 - RNA, 19 nt, Artificial Sequence
  Description of Artificial Sequence:  siNA antisense region
uguagucugggggcgggga

SEQ ID NO: 663 - RNA, 19 nt, Artificial Sequence
  Description of Artificial Sequence:  siNA antisense region
aguacaggaccaccgaguu

SEQ ID NO: 664 - RNA, 19 nt, Artificial Sequence
  Description of Artificial Sequence:  siNA antisense region
ucuagauggguggggugga

SEQ ID NO: 665 - RNA, 19 nt, Artificial Sequence
  Description of Artificial Sequence:  siNA antisense region
uaaggcuucgugucaaacu

SEQ ID NO: 666 - RNA, 19 nt, Artificial Sequence
  Description of Artificial Sequence:  siNA antisense region
cacaugugcuucuagaaau

SEQ ID NO: 667 - RNA, 19 nt, Artificial Sequence
  Description of Artificial Sequence:  siNA antisense region
uuccuggggguauaaauac

SEQ ID NO: 668 - RNA, 19 nt, Artificial Sequence
  Description of Artificial Sequence:  siNA antisense region
auacuggcaaaagcuaguu

SEQ ID NO: 669 - RNA, 19 nt, Artificial Sequence
  Description of Artificial Sequence:  siNA antisense region
uaaacuuauauaugcauaa

SEQ ID NO: 670 - RNA, 19 nt, Artificial Sequence
  Description of Artificial Sequence:  siNA antisense region
cauggaaagauaaaggugu

SEQ ID NO: 671 - RNA, 19 nt, Artificial Sequence
  Description of Artificial Sequence:  siNA antisense region
caaaaagcagcuggcuccc

SEQ ID NO: 672 - RNA, 19 nt, Artificial Sequence
  Description of Artificial Sequence:  siNA antisense region
gcacuauuaaaaaaaucac

SEQ ID NO: 673 - RNA, 19 nt, Artificial Sequence
  Description of Artificial Sequence:  siNA antisense region
guuagucaaaaaaaaaaag

SEQ ID NO: 674 - RNA, 19 nt, Artificial Sequence
  Description of Artificial Sequence:  siNA antisense region
aucuggaguuacauucuug

SEQ ID NO: 675 - RNA, 19 nt, Artificial Sequence
  Description of Artificial Sequence:  siNA antisense region
acuugucacuauuucucua

SEQ ID NO: 676 - RNA, 19 nt, Artificial Sequence
  Description of Artificial Sequence:  siNA antisense region
uuagcaguaguguucuuca

SEQ ID NO: 677 - RNA, 19 nt, Artificial Sequence
  Description of Artificial Sequence:  siNA antisense region
acugaguaacaugaggauu

SEQ ID NO: 678 - RNA, 19 nt, Artificial Sequence
  Description of Artificial Sequence:  siNA antisense region
aggaaggauuucucuaaca

SEQ ID NO: 679 - RNA, 19 nt, Artificial Sequence
  Description of Artificial Sequence:  siNA antisense region
agggaagucauuggguuua

SEQ ID NO: 680 - RNA, 19 nt, Artificial Sequence
  Description of Artificial Sequence:  siNA antisense region
gguggcggggguuggagca

SEQ ID NO: 681 - RNA, 19 nt, Artificial Sequence
  Description of Artificial Sequence:  siNA antisense region
ugguccugcgugcccugag

SEQ ID NO: 682 - RNA, 19 nt, Artificial Sequence
  Description of Artificial Sequence:  siNA antisense region
gcagcuccucaaucaaacu

SEQ ID NO: 683 - RNA, 19 nt, Artificial Sequence
  Description of Artificial Sequence:  siNA antisense region
augcauugggugaucagug

SEQ ID NO: 684 - RNA, 19 nt, Artificial Sequence
  Description of Artificial Sequence:  siNA antisense region
ggcccagugggguacguga

SEQ ID NO: 685 - RNA, 19 nt, Artificial Sequence
  Description of Artificial Sequence:  siNA antisense region
guuuugggcugcagggcug

SEQ ID NO: 686 - RNA, 19 nt, Artificial Sequence
  Description of Artificial Sequence:  siNA antisense region
acgggcuuguugcccuggg

SEQ ID NO: 687 - RNA, 19 nt, Artificial Sequence
  Description of Artificial Sequence:  siNA antisense region
agugauccccuggggcuaa

SEQ ID NO: 688 - RNA, 19 nt, Artificial Sequence
  Description of Artificial Sequence:  siNA antisense region
auguugcucaggccagcca

SEQ ID NO: 689 - RNA, 19 nt, Artificial Sequence
  Description of Artificial Sequence:  siNA antisense region
ugcuagaggacucccgaga

SEQ ID NO: 690 - RNA, 19 nt, Artificial Sequence
  Description of Artificial Sequence:  siNA antisense region
ccucacaugucuuaggccu

SEQ ID NO: 691 - RNA, 19 nt, Artificial Sequence
  Description of Artificial Sequence:  siNA antisense region
gcuuuuuuuccuuuuccuc

SEQ ID NO: 692 - RNA, 19 nt, Artificial Sequence
  Description of Artificial Sequence:  siNA antisense region
uuuucucccuugcuuuuug

SEQ ID NO: 693 - RNA, 19 nt, Artificial Sequence
  Description of Artificial Sequence:  siNA antisense region
gccuucucccgguuucucu

SEQ ID NO: 694 - RNA, 19 nt, Artificial Sequence
  Description of Artificial Sequence:  siNA antisense region
ucucaaauucuuucucaug

SEQ ID NO: 695 - RNA, 19 nt, Artificial Sequence
  Description of Artificial Sequence:  siNA antisense region
ccgugcccacauggugcgu

SEQ ID NO: 696 - RNA, 19 nt, Artificial Sequence
  Description of Artificial Sequence:  siNA antisense region
gcugagccccgucccccuc

SEQ ID NO: 697 - RNA, 19 nt, Artificial Sequence
  Description of Artificial Sequence:  siNA antisense region
agccacugaaauggcauug

SEQ ID NO: 698 - RNA, 19 nt, Artificial Sequence
  Description of Artificial Sequence:  siNA antisense region
gaagggucagagcugggaa

SEQ ID NO: 699 - RNA, 19 nt, Artificial Sequence
  Description of Artificial Sequence:  siNA antisense region
gcugggcccucaaauguag

SEQ ID NO: 700 - RNA, 19 nt, Artificial Sequence
  Description of Artificial Sequence:  siNA antisense region
gcuguccaucugcuccugg

SEQ ID NO: 701 - RNA, 19 nt, Artificial Sequence
  Description of Artificial Sequence:  siNA antisense region
agaaaauguccccucaucg

SEQ ID NO: 702 - RNA, 19 nt, Artificial Sequence
  Description of Artificial Sequence:  siNA antisense region
ucuugccucccagaaucca

SEQ ID NO: 703 - RNA, 19 nt, Artificial Sequence
  Description of Artificial Sequence:  siNA antisense region
aaaagauauuuguccuuuu

SEQ ID NO: 704 - RNA, 19 nt, Artificial Sequence
  Description of Artificial Sequence:  siNA antisense region
aauuugcuuuaguuccaaa

SEQ ID NO: 705 - RNA, 19 nt, Artificial Sequence
  Description of Artificial Sequence:  siNA antisense region
ccauagguaaaggucuaaa

SEQ ID NO: 706 - RNA, 19 nt, Artificial Sequence
  Description of Artificial Sequence:  siNA antisense region
auggacauagaaccacuuc

SEQ ID NO: 707 - RNA, 19 nt, Artificial Sequence
  Description of Artificial Sequence:  siNA antisense region
aacaugccacgaaugagaa

SEQ ID NO: 708 - RNA, 19 nt, Artificial Sequence
  Description of Artificial Sequence:  siNA antisense region
cucagugcuacaaaucaaa

SEQ ID NO: 709 - RNA, 19 nt, Artificial Sequence
  Description of Artificial Sequence:  siNA antisense region
ucagaguugagugccaccc

SEQ ID NO: 710 - RNA, 19 nt, Artificial Sequence
  Description of Artificial Sequence:  siNA antisense region
ggagccaaaaguaugggcu

SEQ ID NO: 711 - RNA, 19 nt, Artificial Sequence
  Description of Artificial Sequence:  siNA antisense region
ucagugcaucuuacuagag

SEQ ID NO: 712 - RNA, 19 nt, Artificial Sequence
  Description of Artificial Sequence:  siNA antisense region
cuaacucuggcuaaguuuu

SEQ ID NO: 713 - RNA, 19 nt, Artificial Sequence
  Description of Artificial Sequence:  siNA antisense region
ucauggccuggagacaacc

SEQ ID NO: 714 - RNA, 19 nt, Artificial Sequence
  Description of Artificial Sequence:  siNA antisense region
auuuucaguguaaggccau

SEQ ID NO: 715 - RNA, 19 nt, Artificial Sequence
  Description of Artificial Sequence:  siNA antisense region
cccaaaauagaaugugaca

SEQ ID NO: 716 - RNA, 19 nt, Artificial Sequence
  Description of Artificial Sequence:  siNA antisense region
cuggacuauauauuaauac

SEQ ID NO: 717 - RNA, 19 nt, Artificial Sequence
  Description of Artificial Sequence:  siNA antisense region
agaaauugaguuaaguguc

SEQ ID NO: 718 - RNA, 19 nt, Artificial Sequence
  Description of Artificial Sequence:  siNA antisense region
caaaacagaauaauaccaa

SEQ ID NO: 719 - RNA, 19 nt, Artificial Sequence
  Description of Artificial Sequence:  siNA antisense region
cuuucacaacuaacugugc

SEQ ID NO: 720 - RNA, 19 nt, Artificial Sequence
  Description of Artificial Sequence:  siNA antisense region
uucauucuucucagcuuuc

SEQ ID NO: 721 - RNA, 19 nt, Artificial Sequence
  Description of Artificial Sequence:  siNA antisense region
ucuccucaggacugcauuu

SEQ ID NO: 722 - RNA, 19 nt, Artificial Sequence
  Description of Artificial Sequence:  siNA antisense region
uuuugauauggagaaaacu

SEQ ID NO: 723 - RNA, 19 nt, Artificial Sequence
  Description of Artificial Sequence:  siNA antisense region
uuccuccaucagcccucgu

SEQ ID NO: 724 - RNA, 19 nt, Artificial Sequence
  Description of Artificial Sequence:  siNA antisense region
uugaccuuauugaccuuuu

SEQ ID NO: 725 - RNA, 19 nt, Artificial Sequence
  Description of Artificial Sequence:  siNA antisense region
uagagacggggucuucccu

SEQ ID NO: 726 - RNA, 19 nt, Artificial Sequence
  Description of Artificial Sequence:  siNA antisense region
gaauugguuugguugguau

SEQ ID NO: 727 - RNA, 19 nt, Artificial Sequence
  Description of Artificial Sequence:  siNA antisense region
ggucccaacuguguuggug

SEQ ID NO: 728 - RNA, 19 nt, Artificial Sequence
  Description of Artificial Sequence:  siNA antisense region
cugacuuccuguguuuugg

SEQ ID NO: 729 - RNA, 19 nt, Artificial Sequence
  Description of Artificial Sequence:  siNA antisense region
aaugaaaaggaaacgugac

SEQ ID NO: 730 - RNA, 19 nt, Artificial Sequence
  Description of Artificial Sequence:  siNA antisense region
auaguggaauccccauuaa

SEQ ID NO: 731 - RNA, 19 nt, Artificial Sequence
  Description of Artificial Sequence:  siNA antisense region
cuuucagauuagugugaga

SEQ ID NO: 732 - RNA, 19 nt, Artificial Sequence
  Description of Artificial Sequence:  siNA antisense region
cuaaugcucuuccacaucc

SEQ ID NO: 733 - RNA, 19 nt, Artificial Sequence
  Description of Artificial Sequence:  siNA antisense region
gugcuuaauaugcgccagc

SEQ ID NO: 734 - RNA, 19 nt, Artificial Sequence
  Description of Artificial Sequence:  siNA antisense region
uuacucaaggagcuuaaag

SEQ ID NO: 735 - RNA, 19 nt, Artificial Sequence
  Description of Artificial Sequence:  siNA antisense region
aaauuacauaccaccuuuu

SEQ ID NO: 736 - RNA, 19 nt, Artificial Sequence
  Description of Artificial Sequence:  siNA antisense region
uggagaaauaccuugcaua

SEQ ID NO: 737 - RNA, 19 nt, Artificial Sequence
  Description of Artificial Sequence:  siNA antisense region
aauauccugagucccaacu

SEQ ID NO: 738 - RNA, 19 nt, Artificial Sequence
  Description of Artificial Sequence:  siNA antisense region
agugauggcucauuaacua

SEQ ID NO: 739 - RNA, 19 nt, Artificial Sequence
  Description of Artificial Sequence:  siNA antisense region
aaaaugggcuuuucuucua

SEQ ID NO: 740 - RNA, 19 nt, Artificial Sequence
  Description of Artificial Sequence:  siNA antisense region
caaguuucaaagcaguuga

SEQ ID NO: 741 - RNA, 19 nt, Artificial Sequence
  Description of Artificial Sequence:  siNA antisense region
ucaugcucagaccccaggc

SEQ ID NO: 742 - RNA, 19 nt, Artificial Sequence
  Description of Artificial Sequence:  siNA antisense region
ccugucucccuauucccau

SEQ ID NO: 743 - RNA, 19 nt, Artificial Sequence
  Description of Artificial Sequence:  siNA antisense region
guaggcgcccuuuccuacc

SEQ ID NO: 744 - RNA, 19 nt, Artificial Sequence
  Description of Artificial Sequence:  siNA antisense region
aucuuuagacccugaagag

SEQ ID NO: 745 - RNA, 19 nt, Artificial Sequence
  Description of Artificial Sequence:  siNA antisense region
cgauccaaggcccacuuga

SEQ ID NO: 746 - RNA, 19 nt, Artificial Sequence
  Description of Artificial Sequence:  siNA antisense region
caaacagagccagcuuagc

SEQ ID NO: 747 - RNA, 19 nt, Artificial Sequence
  Description of Artificial Sequence:  siNA antisense region
aacuugcauaaauagcauc

SEQ ID NO: 748 - RNA, 19 nt, Artificial Sequence
  Description of Artificial Sequence:  siNA antisense region
ccuaaauacauagacccua

SEQ ID NO: 749 - RNA, 19 nt, Artificial Sequence
  Description of Artificial Sequence:  siNA antisense region
ccugaagaguaggcgcauc

SEQ ID NO: 750 - RNA, 19 nt, Artificial Sequence
  Description of Artificial Sequence:  siNA antisense region
cccacuugaucuuuagacc

SEQ ID NO: 751 - RNA, 19 nt, Artificial Sequence
  Description of Artificial Sequence:  siNA antisense region
cagcuuagcgauccaaggc

SEQ ID NO: 752 - RNA, 19 nt, Artificial Sequence
  Description of Artificial Sequence:  siNA antisense region
aauagcaucaaacagagcc

SEQ ID NO: 753 - RNA, 19 nt, Artificial Sequence
  Description of Artificial Sequence:  siNA antisense region
uagacccuaacuugcauaa

SEQ ID NO: 754 - RNA, 19 nt, Artificial Sequence
  Description of Artificial Sequence:  siNA antisense region
gcagacauccuaaauacau

SEQ ID NO: 755 - RNA, 19 nt, Artificial Sequence
  Description of Artificial Sequence:  siNA antisense region
ugacuggcugcagaaggug

SEQ ID NO: 756 - RNA, 19 nt, Artificial Sequence
  Description of Artificial Sequence:  siNA antisense region
uguugccucuccagcuucu

SEQ ID NO: 757 - RNA, 19 nt, Artificial Sequence
  Description of Artificial Sequence:  siNA antisense region
caagaagcagcaauccacu

SEQ ID NO: 758 - RNA, 19 nt, Artificial Sequence
  Description of Artificial Sequence:  siNA antisense region
gaagcauacucuucucccc

SEQ ID NO: 759 - RNA, 19 nt, Artificial Sequence
  Description of Artificial Sequence:  siNA antisense region
aaauuacauggauaaaagg

SEQ ID NO: 760 - RNA, 19 nt, Artificial Sequence
  Description of Artificial Sequence:  siNA antisense region
agcucagguucuacaguua

SEQ ID NO: 761 - RNA, 19 nt, Artificial Sequence
  Description of Artificial Sequence:  siNA antisense region
cauucuucgguuacuuaga

SEQ ID NO: 762 - RNA, 19 nt, Artificial Sequence
  Description of Artificial Sequence:  siNA antisense region
cauaagaacagaggcauac

SEQ ID NO: 763 - RNA, 19 nt, Artificial Sequence
  Description of Artificial Sequence:  siNA antisense region
uuaaacaaggauguggcac

SEQ ID NO: 764 - RNA, 19 nt, Artificial Sequence
  Description of Artificial Sequence:  siNA antisense region
ucuucauacagagagccuu

SEQ ID NO: 765 - RNA, 19 nt, Artificial Sequence
  Description of Artificial Sequence:  siNA antisense region
gcugaugacggucccaucu

SEQ ID NO: 766 - RNA, 19 nt, Artificial Sequence
  Description of Artificial Sequence:  siNA antisense region
aggcucacuagggaaugug

SEQ ID NO: 767 - RNA, 19 nt, Artificial Sequence
  Description of Artificial Sequence:  siNA antisense region
ccgcugccaggagccagua

SEQ ID NO: 768 - RNA, 19 nt, Artificial Sequence
  Description of Artificial Sequence:  siNA antisense region
gugagucuuccacaaaagc

SEQ ID NO: 769 - RNA, 19 nt, Artificial Sequence
  Description of Artificial Sequence:  siNA antisense region
acuccucucuucuggcuag

SEQ ID NO: 770 - RNA, 19 nt, Artificial Sequence
  Description of Artificial Sequence:  siNA antisense region
gguggagaggacuguccca

SEQ ID NO: 771 - RNA, 19 nt, Artificial Sequence
  Description of Artificial Sequence:  siNA antisense region
uguuuggauuuagaucuug

SEQ ID NO: 772 - RNA, 19 nt, Artificial Sequence
  Description of Artificial Sequence:  siNA antisense region
cuggcucuagccugcuuuu

SEQ ID NO: 773 - RNA, 19 nt, Artificial Sequence
  Description of Artificial Sequence:  siNA antisense region
aaagauuuguccucucuuc

SEQ ID NO: 774 - RNA, 19 nt, Artificial Sequence
  Description of Artificial Sequence:  siNA antisense region
guaaagaagaggaacaaca

SEQ ID NO: 775 - RNA, 19 nt, Artificial Sequence
  Description of Artificial Sequence:  siNA antisense region
caggugguuugcguaugug

SEQ ID NO: 776 - RNA, 19 nt, Artificial Sequence
  Description of Artificial Sequence:  siNA antisense region
uaaaauugccagcugucac

SEQ ID NO: 777 - RNA, 19 nt, Artificial Sequence
  Description of Artificial Sequence:  siNA antisense region
uuccaguuaccugauuuau

SEQ ID NO: 778 - RNA, 19 nt, Artificial Sequence
  Description of Artificial Sequence:  siNA antisense region
uuucugaguuuaaccuccu

SEQ ID NO: 779 - RNA, 19 nt, Artificial Sequence
  Description of Artificial Sequence:  siNA antisense region
uugacugaggucuucuuuu

SEQ ID NO: 780 - RNA, 19 nt, Artificial Sequence
  Description of Artificial Sequence:  siNA antisense region
aaaaaaaaaaguagagaau

SEQ ID NO: 781 - RNA, 19 nt, Artificial Sequence
  Description of Artificial Sequence:  siNA antisense region
uaucugauuuggaaaaaaa

SEQ ID NO: 782 - RNA, 19 nt, Artificial Sequence
  Description of Artificial Sequence:  siNA antisense region
cacuauuugcugggcuauu

SEQ ID NO: 783 - RNA, 19 nt, Artificial Sequence
  Description of Artificial Sequence:  siNA antisense region
uaagguuuuauuuguuauc

SEQ ID NO: 784 - RNA, 19 nt, Artificial Sequence
  Description of Artificial Sequence:  siNA antisense region
aaucaagacaugaacagcu

SEQ ID NO: 785 - RNA, 19 nt, Artificial Sequence
  Description of Artificial Sequence:  siNA antisense region
uuaagaauuaauuauugaa

SEQ ID NO: 786 - RNA, 19 nt, Artificial Sequence
  Description of Artificial Sequence:  siNA antisense region
auuauggucucuuaaugau

SEQ ID NO: 787 - RNA, 19 nt, Artificial Sequence
  Description of Artificial Sequence:  siNA antisense region
ucuugaaaaggaguauuua

SEQ ID NO: 788 - RNA, 19 nt, Artificial Sequence
  Description of Artificial Sequence:  siNA antisense region
cuaaugguuuugcuuuucu

SEQ ID NO: 789 - RNA, 19 nt, Artificial Sequence
  Description of Artificial Sequence:  siNA antisense region
aggagcugaguaacaauuc

SEQ ID NO: 790 - RNA, 19 nt, Artificial Sequence
  Description of Artificial Sequence:  siNA antisense region
cuacaaaccugaguuugaa

SEQ ID NO: 791 - RNA, 19 nt, Artificial Sequence
  Description of Artificial Sequence:  siNA antisense region
uggauggacucauguaugc

SEQ ID NO: 792 - RNA, 19 nt, Artificial Sequence
  Description of Artificial Sequence:  siNA antisense region
gaaccauucuuugacugau

SEQ ID NO: 793 - RNA, 19 nt, Artificial Sequence
  Description of Artificial Sequence:  siNA antisense region
acauuaagacuccagaugg

SEQ ID NO: 794 - RNA, 19 nt, Artificial Sequence
  Description of Artificial Sequence:  siNA antisense region
gucuccauuuuucuuucua

SEQ ID NO: 795 - RNA, 19 nt, Artificial Sequence
  Description of Artificial Sequence:  siNA antisense region
acuagcucauuauuacaag

SEQ ID NO: 796 - RNA, 19 nt, Artificial Sequence
  Description of Artificial Sequence:  siNA antisense region
augaacaagcacuuuguaa

SEQ ID NO: 797 - RNA, 19 nt, Artificial Sequence
  Description of Artificial Sequence:  siNA antisense region
auuuucagugcuauuuuaa

SEQ ID NO: 798 - RNA, 19 nt, Artificial Sequence
  Description of Artificial Sequence:  siNA antisense region
caguuaauucauguuucaa

SEQ ID NO: 799 - RNA, 19 nt, Artificial Sequence
  Description of Artificial Sequence:  siNA antisense region
aaaugauuggaauauuauc

SEQ ID NO: 800 - RNA, 19 nt, Artificial Sequence
  Description of Artificial Sequence:  siNA antisense region
auuuuugucauaaauggca

SEQ ID NO: 801 - RNA, 19 nt, Artificial Sequence
  Description of Artificial Sequence:  siNA antisense region
ucuuuguuagugccaacca

SEQ ID NO: 802 - RNA, 19 nt, Artificial Sequence
  Description of Artificial Sequence:  siNA antisense region
cugaaaggaagugcucguu

SEQ ID NO: 803 - RNA, 19 nt, Artificial Sequence
  Description of Artificial Sequence:  siNA antisense region
uacauuaucucagaaacuc

SEQ ID NO: 804 - RNA, 19 nt, Artificial Sequence
  Description of Artificial Sequence:  siNA antisense region
cacccagacuguuccacgu

SEQ ID NO: 805 - RNA, 19 nt, Artificial Sequence
  Description of Artificial Sequence:  siNA antisense region
augguuucagccccauucc

SEQ ID NO: 806 - RNA, 19 nt, Artificial Sequence
  Description of Artificial Sequence:  siNA antisense region
caagacacagacuugcaca

SEQ ID NO: 807 - RNA, 19 nt, Artificial Sequence
  Description of Artificial Sequence:  siNA antisense region
ugucacuucuuggacugac

SEQ ID NO: 808 - RNA, 19 nt, Artificial Sequence
  Description of Artificial Sequence:  siNA antisense region
cuaaaauuaacaucucggu

SEQ ID NO: 809 - RNA, 19 nt, Artificial Sequence
  Description of Artificial Sequence:  siNA antisense region
gaaacaaggcacggguccc

SEQ ID NO: 810 - RNA, 19 nt, Artificial Sequence
  Description of Artificial Sequence:  siNA antisense region
ugcauucuugugggcuagg

SEQ ID NO: 811 - RNA, 19 nt, Artificial Sequence
  Description of Artificial Sequence:  siNA antisense region
gaguaucuguuugauguuu

SEQ ID NO: 812 - RNA, 19 nt, Artificial Sequence
  Description of Artificial Sequence:  siNA antisense region
aauuuaaaugaggcuagcg

SEQ ID NO: 813 - RNA, 19 nt, Artificial Sequence
  Description of Artificial Sequence:  siNA antisense region
ugcacuccuccuuuaauca

SEQ ID NO: 814 - RNA, 19 nt, Artificial Sequence
  Description of Artificial Sequence:  siNA antisense region
accacugucggccaaagau

SEQ ID NO: 815 - RNA, 19 nt, Artificial Sequence
  Description of Artificial Sequence:  siNA antisense region
acacacacacacaguuaca

SEQ ID NO: 816 - RNA, 19 nt, Artificial Sequence
  Description of Artificial Sequence:  siNA antisense region
acacacacacacacacaca

SEQ ID NO: 817 - RNA, 19 nt, Artificial Sequence
  Description of Artificial Sequence:  siNA antisense region
ccacacccacacacacaca

SEQ ID NO: 818 - RNA, 19 nt, Artificial Sequence
  Description of Artificial Sequence:  siNA antisense region
cacaaaacacacauacacc

SEQ ID NO: 819 - RNA, 19 nt, Artificial Sequence
  Description of Artificial Sequence:  siNA antisense region
uuuccuuaaauaguuaugc

SEQ ID NO: 820 - RNA, 19 nt, Artificial Sequence
  Description of Artificial Sequence:  siNA antisense region
guaacuuuaaaauuccagu

SEQ ID NO: 821 - RNA, 19 nt, Artificial Sequence
  Description of Artificial Sequence:  siNA antisense region
uucuugguuuguauaaaag

SEQ ID NO: 822 - RNA, 19 nt, Artificial Sequence
  Description of Artificial Sequence:  siNA antisense region
uuauaucuguagcauauau

SEQ ID NO: 823 - RNA, 19 nt, Artificial Sequence
  Description of Artificial Sequence:  siNA antisense region
gaccaaaccaugucugucu

SEQ ID NO: 824 - RNA, 19 nt, Artificial Sequence
  Description of Artificial Sequence:  siNA antisense region
ucaugacuagaaauauagg

SEQ ID NO: 825 - RNA, 19 nt, Artificial Sequence
  Description of Artificial Sequence:  siNA antisense region
guauacaaaauacauucau

SEQ ID NO: 826 - RNA, 19 nt, Artificial Sequence
  Description of Artificial Sequence:  siNA antisense region
guauauuauaugaagaugg

SEQ ID NO: 827 - RNA, 19 nt, Artificial Sequence
  Description of Artificial Sequence:  siNA antisense region
auuaagaaauauuuuuaag

SEQ ID NO: 828 - RNA, 19 nt, Artificial Sequence
  Description of Artificial Sequence:  siNA antisense region
guacgauuacaaaucccaa

SEQ ID NO: 829 - RNA, 19 nt, Artificial Sequence
  Description of Artificial Sequence:  siNA antisense region
aguuuaucaauuaaguugg

SEQ ID NO: 830 - RNA, 19 nt, Artificial Sequence
  Description of Artificial Sequence:  siNA antisense region
acauaaaagcaguugccaa

SEQ ID NO: 831 - RNA, 19 nt, Artificial Sequence
  Description of Artificial Sequence:  siNA antisense region
uuuauggaaggagacagaa

SEQ ID NO: 832 - RNA, 19 nt, Artificial Sequence
  Description of Artificial Sequence:  siNA antisense region
aauuaguauuuugaaaaau

SEQ ID NO: 833 - RNA, 19 nt, Artificial Sequence
  Description of Artificial Sequence:  siNA antisense region
agagcuuuuucuuuguuga

SEQ ID NO: 834 - RNA, 19 nt, Artificial Sequence
  Description of Artificial Sequence:  siNA antisense region
uuuauuuuaggaaaaaaaa

SEQ ID NO: 835 - RNA, 19 nt, Artificial Sequence
  Description of Artificial Sequence:  siNA antisense region
aacaaggauaaauuugagu

SEQ ID NO: 836 - RNA, 19 nt, Artificial Sequence
  Description of Artificial Sequence:  siNA antisense region
uaauuuuucucugcucuaa

SEQ ID NO: 837 - RNA, 19 nt, Artificial Sequence
  Description of Artificial Sequence:  siNA antisense region
ccauuucaaaguuuuucuu

SEQ ID NO: 838 - RNA, 19 nt, Artificial Sequence
  Description of Artificial Sequence:  siNA antisense region
uuuagcaauuuuuugagac

SEQ ID NO: 839 - RNA, 19 nt, Artificial Sequence
  Description of Artificial Sequence:  siNA antisense region
aguuuuccauugaaaauau

SEQ ID NO: 840 - RNA, 19 nt, Artificial Sequence
  Description of Artificial Sequence:  siNA antisense region
ucagcuaaacuaacauuua

SEQ ID NO: 841 - RNA, 19 nt, Artificial Sequence
  Description of Artificial Sequence:  siNA antisense region
uucgaaaaccccauacaau

SEQ ID NO: 842 - RNA, 19 nt, Artificial Sequence
  Description of Artificial Sequence:  siNA antisense region
caaacaaaaagugaaaggu

SEQ ID NO: 843 - RNA, 19 nt, Artificial Sequence
  Description of Artificial Sequence:  siNA antisense region
guugugaaauagguaaaac

SEQ ID NO: 844 - RNA, 19 nt, Artificial Sequence
  Description of Artificial Sequence:  siNA antisense region
uuauuggcaauuuacacag

SEQ ID NO: 845 - RNA, 19 nt, Artificial Sequence
  Description of Artificial Sequence:  siNA antisense region
cauuuucauggacaggaau

SEQ ID NO: 846 - RNA, 19 nt, Artificial Sequence
  Description of Artificial Sequence:  siNA antisense region
ucuacacuggauaauuugc

SEQ ID NO: 847 - RNA, 19 nt, Artificial Sequence
  Description of Artificial Sequence:  siNA antisense region
gggugauggucaaauauau

SEQ ID NO: 848 - RNA, 19 nt, Artificial Sequence
  Description of Artificial Sequence:  siNA antisense region
aacuagccaauauccauag

SEQ ID NO: 849 - RNA, 19 nt, Artificial Sequence
  Description of Artificial Sequence:  siNA antisense region
uuugcuuaauaaaggcaaa

SEQ ID NO: 850 - RNA, 19 nt, Artificial Sequence
  Description of Artificial Sequence:  siNA antisense region
cauucaggcugaaaugaau

SEQ ID NO: 851 - RNA, 19 nt, Artificial Sequence
  Description of Artificial Sequence:  siNA antisense region
agagaauauauaggcagac

SEQ ID NO: 852 - RNA, 19 nt, Artificial Sequence
  Description of Artificial Sequence:  siNA antisense region
aaggagaauacaaagagca

SEQ ID NO: 853 - RNA, 19 nt, Artificial Sequence
  Description of Artificial Sequence:  siNA antisense region
gauguuuuaacggguucaa

SEQ ID NO: 854 - RNA, 19 nt, Artificial Sequence
  Description of Artificial Sequence:  siNA antisense region
gagugccacaggauguuuu

SEQ ID NO: 855 - RNA, 19 nt, Artificial Sequence
  Description of Artificial Sequence:  Target Sequence/siNA sense region
acugagucccgggaccccg

SEQ ID NO: 856 - RNA, 19 nt, Artificial Sequence
  Description of Artificial Sequence:  Target Sequence/siNA sense region
gggagagcggucagugugu

SEQ ID NO: 857 - RNA, 19 nt, Artificial Sequence
  Description of Artificial Sequence:  Target Sequence/siNA sense region
uggucgcugcguuuccucu

SEQ ID NO: 858 - RNA, 19 nt, Artificial Sequence
  Description of Artificial Sequence:  Target Sequence/siNA sense region
ugccugcgccgggcaucac

SEQ ID NO: 859 - RNA, 19 nt, Artificial Sequence
  Description of Artificial Sequence:  Target Sequence/siNA sense region
cuugcgcgccgcagaaagu

SEQ ID NO: 860 - RNA, 19 nt, Artificial Sequence
  Description of Artificial Sequence:  Target Sequence/siNA sense region
uccgucuggcagccuggau

SEQ ID NO: 861 - RNA, 19 nt, Artificial Sequence
  Description of Artificial Sequence:  Target Sequence/siNA sense region
uauccucuccuaccggcac

SEQ ID NO: 862 - RNA, 19 nt, Artificial Sequence
  Description of Artificial Sequence:  Target Sequence/siNA sense region
cccgcagacgccccugcag

SEQ ID NO: 863 - RNA, 19 nt, Artificial Sequence
  Description of Artificial Sequence:  Target Sequence/siNA sense region
gccgccggucggcgcccgg

SEQ ID NO: 864 - RNA, 19 nt, Artificial Sequence
  Description of Artificial Sequence:  Target Sequence/siNA sense region
ggcucccuagcccugugcg

SEQ ID NO: 865 - RNA, 19 nt, Artificial Sequence
  Description of Artificial Sequence:  Target Sequence/siNA sense region
gcucaacuguccugcgcug

SEQ ID NO: 866 - RNA, 19 nt, Artificial Sequence
  Description of Artificial Sequence:  Target Sequence/siNA sense region
gcggggugccgcgaguucc

SEQ ID NO: 867 - RNA, 19 nt, Artificial Sequence
  Description of Artificial Sequence:  Target Sequence/siNA sense region
caccuccgcgccuccuucu

SEQ ID NO: 868 - RNA, 19 nt, Artificial Sequence
  Description of Artificial Sequence:  Target Sequence/siNA sense region
ucuagacaggcgcugggag

SEQ ID NO: 869 - RNA, 19 nt, Artificial Sequence
  Description of Artificial Sequence:  Target Sequence/siNA sense region
gaaagaaccggcucccgag

SEQ ID NO: 870 - RNA, 19 nt, Artificial Sequence
  Description of Artificial Sequence:  Target Sequence/siNA sense region
guucugggcauuucgcccg

SEQ ID NO: 871 - RNA, 19 nt, Artificial Sequence
  Description of Artificial Sequence:  Target Sequence/siNA sense region
ggcucgaggugcaggaugc

SEQ ID NO: 872 - RNA, 19 nt, Artificial Sequence
  Description of Artificial Sequence:  Target Sequence/siNA sense region
cagagcaaggugcugcugg

SEQ ID NO: 873 - RNA, 19 nt, Artificial Sequence
  Description of Artificial Sequence:  Target Sequence/siNA sense region
gccgucgcccuguggcucu

SEQ ID NO: 874 - RNA, 19 nt, Artificial Sequence
  Description of Artificial Sequence:  Target Sequence/siNA sense region
ugcguggagacccgggccg

SEQ ID NO: 875 - RNA, 19 nt, Artificial Sequence
  Description of Artificial Sequence:  Target Sequence/siNA sense region
gccucuguggguuugccua

SEQ ID NO: 876 - RNA, 19 nt, Artificial Sequence
  Description of Artificial Sequence:  Target Sequence/siNA sense region
aguguuucucuugaucugc

SEQ ID NO: 877 - RNA, 19 nt, Artificial Sequence
  Description of Artificial Sequence:  Target Sequence/siNA sense region
cccaggcucagcauacaaa

SEQ ID NO: 878 - RNA, 19 nt, Artificial Sequence
  Description of Artificial Sequence:  Target Sequence/siNA sense region
aaagacauacuuacaauua

SEQ ID NO: 879 - RNA, 19 nt, Artificial Sequence
  Description of Artificial Sequence:  Target Sequence/siNA sense region
aaggcuaauacaacucuuc

SEQ ID NO: 880 - RNA, 19 nt, Artificial Sequence
  Description of Artificial Sequence:  Target Sequence/siNA sense region
caaauuacuugcaggggac

SEQ ID NO: 881 - RNA, 19 nt, Artificial Sequence
  Description of Artificial Sequence:  Target Sequence/siNA sense region
cagagggacuuggacuggc

SEQ ID NO: 882 - RNA, 19 nt, Artificial Sequence
  Description of Artificial Sequence:  Target Sequence/siNA sense region
cuuuggcccaauaaucaga

SEQ ID NO: 883 - RNA, 19 nt, Artificial Sequence
  Description of Artificial Sequence:  Target Sequence/siNA sense region
aguggcagugagcaaaggg

SEQ ID NO: 884 - RNA, 19 nt, Artificial Sequence
  Description of Artificial Sequence:  Target Sequence/siNA sense region
guggaggugacugagugca

SEQ ID NO: 885 - RNA, 19 nt, Artificial Sequence
  Description of Artificial Sequence:  Target Sequence/siNA sense region
agcgauggccucuucugua

SEQ ID NO: 886 - RNA, 19 nt, Artificial Sequence
  Description of Artificial Sequence:  Target Sequence/siNA sense region
aagacacucacaauuccaa

SEQ ID NO: 887 - RNA, 19 nt, Artificial Sequence
  Description of Artificial Sequence:  Target Sequence/siNA sense region
aaagugaucggaaaugaca

SEQ ID NO: 888 - RNA, 19 nt, Artificial Sequence
  Description of Artificial Sequence:  Target Sequence/siNA sense region
acuggagccuacaagugcu

SEQ ID NO: 889 - RNA, 19 nt, Artificial Sequence
  Description of Artificial Sequence:  Target Sequence/siNA sense region
uucuaccgggaaacugacu

SEQ ID NO: 890 - RNA, 19 nt, Artificial Sequence
  Description of Artificial Sequence:  Target Sequence/siNA sense region
uuggccucggucauuuaug

SEQ ID NO: 891 - RNA, 19 nt, Artificial Sequence
  Description of Artificial Sequence:  Target Sequence/siNA sense region
gucuauguucaagauuaca

SEQ ID NO: 892 - RNA, 19 nt, Artificial Sequence
  Description of Artificial Sequence:  Target Sequence/siNA sense region
agaucuccauuuauugcuu

SEQ ID NO: 893 - RNA, 19 nt, Artificial Sequence
  Description of Artificial Sequence:  Target Sequence/siNA sense region
ucuguuagugaccaacaug

SEQ ID NO: 894 - RNA, 19 nt, Artificial Sequence
  Description of Artificial Sequence:  Target Sequence/siNA sense region
ggagucguguacauuacug

SEQ ID NO: 895 - RNA, 19 nt, Artificial Sequence
  Description of Artificial Sequence:  Target Sequence/siNA sense region
gagaacaaaaacaaaacug

SEQ ID NO: 896 - RNA, 19 nt, Artificial Sequence
  Description of Artificial Sequence:  Target Sequence/siNA sense region
guggugauuccaugucucg

SEQ ID NO: 897 - RNA, 19 nt, Artificial Sequence
  Description of Artificial Sequence:  Target Sequence/siNA sense region
ggguccauuucaaaucuca

SEQ ID NO: 898 - RNA, 19 nt, Artificial Sequence
  Description of Artificial Sequence:  Target Sequence/siNA sense region
aacgugucacuuugugcaa

SEQ ID NO: 899 - RNA, 19 nt, Artificial Sequence
  Description of Artificial Sequence:  Target Sequence/siNA sense region
agauacccagaaaagagau

SEQ ID NO: 900 - RNA, 19 nt, Artificial Sequence
  Description of Artificial Sequence:  Target Sequence/siNA sense region
uuuguuccugaugguaaca

SEQ ID NO: 901 - RNA, 19 nt, Artificial Sequence
  Description of Artificial Sequence:  Target Sequence/siNA sense region
agaauuuccugggacagca

SEQ ID NO: 902 - RNA, 19 nt, Artificial Sequence
  Description of Artificial Sequence:  Target Sequence/siNA sense region
aagaagggcuuuacuauuc

SEQ ID NO: 903 - RNA, 19 nt, Artificial Sequence
  Description of Artificial Sequence:  Target Sequence/siNA sense region
cccagcuacaugaucagcu

SEQ ID NO: 904 - RNA, 19 nt, Artificial Sequence
  Description of Artificial Sequence:  Target Sequence/siNA sense region
uaugcuggcauggucuucu

SEQ ID NO: 905 - RNA, 19 nt, Artificial Sequence
  Description of Artificial Sequence:  Target Sequence/siNA sense region
ugugaagcaaaaauuaaug

SEQ ID NO: 906 - RNA, 19 nt, Artificial Sequence
  Description of Artificial Sequence:  Target Sequence/siNA sense region
gaugaaaguuaccagucua

SEQ ID NO: 907 - RNA, 19 nt, Artificial Sequence
  Description of Artificial Sequence:  Target Sequence/siNA sense region
auuauguacauaguugucg

SEQ ID NO: 908 - RNA, 19 nt, Artificial Sequence
  Description of Artificial Sequence:  Target Sequence/siNA sense region
guuguaggguauaggauuu

SEQ ID NO: 909 - RNA, 19 nt, Artificial Sequence
  Description of Artificial Sequence:  Target Sequence/siNA sense region
uaugaugugguucugaguc

SEQ ID NO: 910 - RNA, 19 nt, Artificial Sequence
  Description of Artificial Sequence:  Target Sequence/siNA sense region
ccgucucauggaauugaac

SEQ ID NO: 911 - RNA, 19 nt, Artificial Sequence
  Description of Artificial Sequence:  Target Sequence/siNA sense region
cuaucuguuggagaaaagc

SEQ ID NO: 912 - RNA, 19 nt, Artificial Sequence
  Description of Artificial Sequence:  Target Sequence/siNA sense region
cuugucuuaaauuguacag

SEQ ID NO: 913 - RNA, 19 nt, Artificial Sequence
  Description of Artificial Sequence:  Target Sequence/siNA sense region
gcaagaacugaacuaaaug

SEQ ID NO: 914 - RNA, 19 nt, Artificial Sequence
  Description of Artificial Sequence:  Target Sequence/siNA sense region
guggggauugacuucaacu

SEQ ID NO: 915 - RNA, 19 nt, Artificial Sequence
  Description of Artificial Sequence:  Target Sequence/siNA sense region
ugggaauacccuucuucga

SEQ ID NO: 916 - RNA, 19 nt, Artificial Sequence
  Description of Artificial Sequence:  Target Sequence/siNA sense region
aagcaucagcauaagaaac

SEQ ID NO: 917 - RNA, 19 nt, Artificial Sequence
  Description of Artificial Sequence:  Target Sequence/siNA sense region
cuuguaaaccgagaccuaa

SEQ ID NO: 918 - RNA, 19 nt, Artificial Sequence
  Description of Artificial Sequence:  Target Sequence/siNA sense region
aaaacccagucugggagug

SEQ ID NO: 919 - RNA, 19 nt, Artificial Sequence
  Description of Artificial Sequence:  Target Sequence/siNA sense region
gagaugaagaaauuuuuga

SEQ ID NO: 920 - RNA, 19 nt, Artificial Sequence
  Description of Artificial Sequence:  Target Sequence/siNA sense region
agcaccuuaacuauagaug

SEQ ID NO: 921 - RNA, 19 nt, Artificial Sequence
  Description of Artificial Sequence:  Target Sequence/siNA sense region
gguguaacccggagugacc

SEQ ID NO: 922 - RNA, 19 nt, Artificial Sequence
  Description of Artificial Sequence:  Target Sequence/siNA sense region
caaggauuguacaccugug

SEQ ID NO: 923 - RNA, 19 nt, Artificial Sequence
  Description of Artificial Sequence:  Target Sequence/siNA sense region
gcagcauccagugggcuga

SEQ ID NO: 924 - RNA, 19 nt, Artificial Sequence
  Description of Artificial Sequence:  Target Sequence/siNA sense region
augaccaagaagaacagca

SEQ ID NO: 925 - RNA, 19 nt, Artificial Sequence
  Description of Artificial Sequence:  Target Sequence/siNA sense region
acauuugucaggguccaug

SEQ ID NO: 926 - RNA, 19 nt, Artificial Sequence
  Description of Artificial Sequence:  Target Sequence/siNA sense region
gaaaaaccuuuuguugcuu

SEQ ID NO: 927 - RNA, 19 nt, Artificial Sequence
  Description of Artificial Sequence:  Target Sequence/siNA sense region
uuuggaaguggcauggaau

SEQ ID NO: 928 - RNA, 19 nt, Artificial Sequence
  Description of Artificial Sequence:  Target Sequence/siNA sense region
ucucugguggaagccacgg

SEQ ID NO: 929 - RNA, 19 nt, Artificial Sequence
  Description of Artificial Sequence:  Target Sequence/siNA sense region
gugggggagcgugucagaa

SEQ ID NO: 930 - RNA, 19 nt, Artificial Sequence
  Description of Artificial Sequence:  Target Sequence/siNA sense region
aucccugcgaaguaccuug

SEQ ID NO: 931 - RNA, 19 nt, Artificial Sequence
  Description of Artificial Sequence:  Target Sequence/siNA sense region
gguuacccacccccagaaa

SEQ ID NO: 932 - RNA, 19 nt, Artificial Sequence
  Description of Artificial Sequence:  Target Sequence/siNA sense region
auaaaaugguauaaaaaug

SEQ ID NO: 933 - RNA, 19 nt, Artificial Sequence
  Description of Artificial Sequence:  Target Sequence/siNA sense region
ggaauaccccuugagucca

SEQ ID NO: 934 - RNA, 19 nt, Artificial Sequence
  Description of Artificial Sequence:  Target Sequence/siNA sense region
aaucacacaauuaaagcgg

SEQ ID NO: 935 - RNA, 19 nt, Artificial Sequence
  Description of Artificial Sequence:  Target Sequence/siNA sense region
gggcauguacugacgauua

SEQ ID NO: 936 - RNA, 19 nt, Artificial Sequence
  Description of Artificial Sequence:  Target Sequence/siNA sense region
auggaagugagugaaagag

SEQ ID NO: 937 - RNA, 19 nt, Artificial Sequence
  Description of Artificial Sequence:  Target Sequence/siNA sense region
gacacaggaaauuacacug

SEQ ID NO: 938 - RNA, 19 nt, Artificial Sequence
  Description of Artificial Sequence:  Target Sequence/siNA sense region
gucauccuuaccaauccca

SEQ ID NO: 939 - RNA, 19 nt, Artificial Sequence
  Description of Artificial Sequence:  Target Sequence/siNA sense region
auuucaaaggagaagcaga

SEQ ID NO: 940 - RNA, 19 nt, Artificial Sequence
  Description of Artificial Sequence:  Target Sequence/siNA sense region
agccauguggucucucugg

SEQ ID NO: 941 - RNA, 19 nt, Artificial Sequence
  Description of Artificial Sequence:  Target Sequence/siNA sense region
guuguguaugucccacccc

SEQ ID NO: 942 - RNA, 19 nt, Artificial Sequence
  Description of Artificial Sequence:  Target Sequence/siNA sense region
cagauuggugagaaaucuc

SEQ ID NO: 943 - RNA, 19 nt, Artificial Sequence
  Description of Artificial Sequence:  Target Sequence/siNA sense region
cuaaucucuccuguggauu

SEQ ID NO: 944 - RNA, 19 nt, Artificial Sequence
  Description of Artificial Sequence:  Target Sequence/siNA sense region
uccuaccaguacggcacca

SEQ ID NO: 945 - RNA, 19 nt, Artificial Sequence
  Description of Artificial Sequence:  Target Sequence/siNA sense region
acucaaacgcugacaugua

SEQ ID NO: 946 - RNA, 19 nt, Artificial Sequence
  Description of Artificial Sequence:  Target Sequence/siNA sense region
acggucuaugccauuccuc

SEQ ID NO: 947 - RNA, 19 nt, Artificial Sequence
  Description of Artificial Sequence:  Target Sequence/siNA sense region
cccccgcaucacauccacu

SEQ ID NO: 948 - RNA, 19 nt, Artificial Sequence
  Description of Artificial Sequence:  Target Sequence/siNA sense region
ugguauuggcaguuggagg

SEQ ID NO: 949 - RNA, 19 nt, Artificial Sequence
  Description of Artificial Sequence:  Target Sequence/siNA sense region
gaagagugcgccaacgagc

SEQ ID NO: 950 - RNA, 19 nt, Artificial Sequence
  Description of Artificial Sequence:  Target Sequence/siNA sense region
cccagccaagcugucucag

SEQ ID NO: 951 - RNA, 19 nt, Artificial Sequence
  Description of Artificial Sequence:  Target Sequence/siNA sense region
gugacaaacccauacccuu

SEQ ID NO: 952 - RNA, 19 nt, Artificial Sequence
  Description of Artificial Sequence:  Target Sequence/siNA sense region
ugugaagaauggagaagug

SEQ ID NO: 953 - RNA, 19 nt, Artificial Sequence
  Description of Artificial Sequence:  Target Sequence/siNA sense region
guggaggacuuccagggag

SEQ ID NO: 954 - RNA, 19 nt, Artificial Sequence
  Description of Artificial Sequence:  Target Sequence/siNA sense region
ggaaauaaaauugaaguua

SEQ ID NO: 955 - RNA, 19 nt, Artificial Sequence
  Description of Artificial Sequence:  Target Sequence/siNA sense region
aauaaaaaucaauuugcuc

SEQ ID NO: 956 - RNA, 19 nt, Artificial Sequence
  Description of Artificial Sequence:  Target Sequence/siNA sense region
cuaauugaaggaaaaaaca

SEQ ID NO: 957 - RNA, 19 nt, Artificial Sequence
  Description of Artificial Sequence:  Target Sequence/siNA sense region
aaaacuguaaguacccuug

SEQ ID NO: 958 - RNA, 19 nt, Artificial Sequence
  Description of Artificial Sequence:  Target Sequence/siNA sense region
guuauccaagcggcaaaug

SEQ ID NO: 959 - RNA, 19 nt, Artificial Sequence
  Description of Artificial Sequence:  Target Sequence/siNA sense region
gugucagcuuuguacaaau

SEQ ID NO: 960 - RNA, 19 nt, Artificial Sequence
  Description of Artificial Sequence:  Target Sequence/siNA sense region
ugugaagcggucaacaaag

SEQ ID NO: 961 - RNA, 19 nt, Artificial Sequence
  Description of Artificial Sequence:  Target Sequence/siNA sense region
gucgggagaggagagaggg

SEQ ID NO: 962 - RNA, 19 nt, Artificial Sequence
  Description of Artificial Sequence:  Target Sequence/siNA sense region
gugaucuccuuccacguga

SEQ ID NO: 963 - RNA, 19 nt, Artificial Sequence
  Description of Artificial Sequence:  Target Sequence/siNA sense region
accagggguccugaaauua

SEQ ID NO: 964 - RNA, 19 nt, Artificial Sequence
  Description of Artificial Sequence:  Target Sequence/siNA sense region
acuuugcaaccugacaugc

SEQ ID NO: 965 - RNA, 19 nt, Artificial Sequence
  Description of Artificial Sequence:  Target Sequence/siNA sense region
cagcccacugagcaggaga

SEQ ID NO: 966 - RNA, 19 nt, Artificial Sequence
  Description of Artificial Sequence:  Target Sequence/siNA sense region
agcgugucuuuguggugca

SEQ ID NO: 967 - RNA, 19 nt, Artificial Sequence
  Description of Artificial Sequence:  Target Sequence/siNA sense region
acugcagacagaucuacgu

SEQ ID NO: 968 - RNA, 19 nt, Artificial Sequence
  Description of Artificial Sequence:  Target Sequence/siNA sense region
uuugagaaccucacauggu

SEQ ID NO: 969 - RNA, 19 nt, Artificial Sequence
  Description of Artificial Sequence:  Target Sequence/siNA sense region
uacaagcuuggcccacagc

SEQ ID NO: 970 - RNA, 19 nt, Artificial Sequence
  Description of Artificial Sequence:  Target Sequence/siNA sense region
ccucugccaauccaugugg

SEQ ID NO: 971 - RNA, 19 nt, Artificial Sequence
  Description of Artificial Sequence:  Target Sequence/siNA sense region
ggagaguugcccacaccug

SEQ ID NO: 972 - RNA, 19 nt, Artificial Sequence
  Description of Artificial Sequence:  Target Sequence/siNA sense region
guuugcaagaacuuggaua

SEQ ID NO: 973 - RNA, 19 nt, Artificial Sequence
  Description of Artificial Sequence:  Target Sequence/siNA sense region
acucuuuggaaauugaaug

SEQ ID NO: 974 - RNA, 19 nt, Artificial Sequence
  Description of Artificial Sequence:  Target Sequence/siNA sense region
gccaccauguucucuaaua

SEQ ID NO: 975 - RNA, 19 nt, Artificial Sequence
  Description of Artificial Sequence:  Target Sequence/siNA sense region
agcacaaaugacauuuuga

SEQ ID NO: 976 - RNA, 19 nt, Artificial Sequence
  Description of Artificial Sequence:  Target Sequence/siNA sense region
aucauggagcuuaagaaug

SEQ ID NO: 977 - RNA, 19 nt, Artificial Sequence
  Description of Artificial Sequence:  Target Sequence/siNA sense region
gcauccuugcaggaccaag

SEQ ID NO: 978 - RNA, 19 nt, Artificial Sequence
  Description of Artificial Sequence:  Target Sequence/siNA sense region
ggagacuaugucugccuug

SEQ ID NO: 979 - RNA, 19 nt, Artificial Sequence
  Description of Artificial Sequence:  Target Sequence/siNA sense region
gcucaagacaggaagacca

SEQ ID NO: 980 - RNA, 19 nt, Artificial Sequence
  Description of Artificial Sequence:  Target Sequence/siNA sense region
aagaaaagacauugcgugg

SEQ ID NO: 981 - RNA, 19 nt, Artificial Sequence
  Description of Artificial Sequence:  Target Sequence/siNA sense region
gucaggcagcucacagucc

SEQ ID NO: 982 - RNA, 19 nt, Artificial Sequence
  Description of Artificial Sequence:  Target Sequence/siNA sense region
cuagagcguguggcaccca

SEQ ID NO: 983 - RNA, 19 nt, Artificial Sequence
  Description of Artificial Sequence:  Target Sequence/siNA sense region
acgaucacaggaaaccugg

SEQ ID NO: 984 - RNA, 19 nt, Artificial Sequence
  Description of Artificial Sequence:  Target Sequence/siNA sense region
gagaaucagacgacaagua

SEQ ID NO: 985 - RNA, 19 nt, Artificial Sequence
  Description of Artificial Sequence:  Target Sequence/siNA sense region
auuggggaaagcaucgaag

SEQ ID NO: 986 - RNA, 19 nt, Artificial Sequence
  Description of Artificial Sequence:  Target Sequence/siNA sense region
gucucaugcacggcaucug

SEQ ID NO: 987 - RNA, 19 nt, Artificial Sequence
  Description of Artificial Sequence:  Target Sequence/siNA sense region
gggaaucccccuccacaga

SEQ ID NO: 988 - RNA, 19 nt, Artificial Sequence
  Description of Artificial Sequence:  Target Sequence/siNA sense region
aucaugugguuuaaagaua

SEQ ID NO: 989 - RNA, 19 nt, Artificial Sequence
  Description of Artificial Sequence:  Target Sequence/siNA sense region
aaugagacccuuguagaag

SEQ ID NO: 990 - RNA, 19 nt, Artificial Sequence
  Description of Artificial Sequence:  Target Sequence/siNA sense region
gacucaggcauuguauuga

SEQ ID NO: 991 - RNA, 19 nt, Artificial Sequence
  Description of Artificial Sequence:  Target Sequence/siNA sense region
aaggaugggaaccggaacc

SEQ ID NO: 992 - RNA, 19 nt, Artificial Sequence
  Description of Artificial Sequence:  Target Sequence/siNA sense region
cucacuauccgcagaguga

SEQ ID NO: 993 - RNA, 19 nt, Artificial Sequence
  Description of Artificial Sequence:  Target Sequence/siNA sense region
aggaaggaggacgaaggcc

SEQ ID NO: 994 - RNA, 19 nt, Artificial Sequence
  Description of Artificial Sequence:  Target Sequence/siNA sense region
cucuacaccugccaggcau

SEQ ID NO: 995 - RNA, 19 nt, Artificial Sequence
  Description of Artificial Sequence:  Target Sequence/siNA sense region
ugcaguguucuuggcugug

SEQ ID NO: 996 - RNA, 19 nt, Artificial Sequence
  Description of Artificial Sequence:  Target Sequence/siNA sense region
gcaaaaguggaggcauuuu

SEQ ID NO: 997 - RNA, 19 nt, Artificial Sequence
  Description of Artificial Sequence:  Target Sequence/siNA sense region
uucauaauagaaggugccc

SEQ ID NO: 998 - RNA, 19 nt, Artificial Sequence
  Description of Artificial Sequence:  Target Sequence/siNA sense region
caggaaaagacgaacuugg

SEQ ID NO: 999 - RNA, 19 nt, Artificial Sequence
  Description of Artificial Sequence:  Target Sequence/siNA sense region
gaaaucauuauucuaguag

SEQ ID NO: 1000 - RNA, 19 nt, Artificial Sequence
  Description of Artificial Sequence:  Target Sequence/siNA sense region
ggcacggcggugauugcca

SEQ ID NO: 1001 - RNA, 19 nt, Artificial Sequence
  Description of Artificial Sequence:  Target Sequence/siNA sense region
auguucuucuggcuacuuc

SEQ ID NO: 1002 - RNA, 19 nt, Artificial Sequence
  Description of Artificial Sequence:  Target Sequence/siNA sense region
cuugucaucauccuacgga

SEQ ID NO: 1003 - RNA, 19 nt, Artificial Sequence
  Description of Artificial Sequence:  Target Sequence/siNA sense region
accguuaagcgggccaaug

SEQ ID NO: 1004 - RNA, 19 nt, Artificial Sequence
  Description of Artificial Sequence:  Target Sequence/siNA sense region
ggaggggaacugaagacag

SEQ ID NO: 1005 - RNA, 19 nt, Artificial Sequence
  Description of Artificial Sequence:  Target Sequence/siNA sense region
ggcuacuuguccaucguca

SEQ ID NO: 1006 - RNA, 19 nt, Artificial Sequence
  Description of Artificial Sequence:  Target Sequence/siNA sense region
auggauccagaugaacucc

SEQ ID NO: 1007 - RNA, 19 nt, Artificial Sequence
  Description of Artificial Sequence:  Target Sequence/siNA sense region
ccauuggaugaacauugug

SEQ ID NO: 1008 - RNA, 19 nt, Artificial Sequence
  Description of Artificial Sequence:  Target Sequence/siNA sense region
gaacgacugccuuaugaug

SEQ ID NO: 1009 - RNA, 19 nt, Artificial Sequence
  Description of Artificial Sequence:  Target Sequence/siNA sense region
gccagcaaaugggaauucc

SEQ ID NO: 1010 - RNA, 19 nt, Artificial Sequence
  Description of Artificial Sequence:  Target Sequence/siNA sense region
cccagagaccggcugaagc

SEQ ID NO: 1011 - RNA, 19 nt, Artificial Sequence
  Description of Artificial Sequence:  Target Sequence/siNA sense region
cuagguaagccucuuggcc

SEQ ID NO: 1012 - RNA, 19 nt, Artificial Sequence
  Description of Artificial Sequence:  Target Sequence/siNA sense region
cguggugccuuuggccaag

SEQ ID NO: 1013 - RNA, 19 nt, Artificial Sequence
  Description of Artificial Sequence:  Target Sequence/siNA sense region
gugauugaagcagaugccu

SEQ ID NO: 1014 - RNA, 19 nt, Artificial Sequence
  Description of Artificial Sequence:  Target Sequence/siNA sense region
uuuggaauugacaagacag

SEQ ID NO: 1015 - RNA, 19 nt, Artificial Sequence
  Description of Artificial Sequence:  Target Sequence/siNA sense region
gcaacuugcaggacaguag

SEQ ID NO: 1016 - RNA, 19 nt, Artificial Sequence
  Description of Artificial Sequence:  Target Sequence/siNA sense region
gcagucaaaauguugaaag

SEQ ID NO: 1017 - RNA, 19 nt, Artificial Sequence
  Description of Artificial Sequence:  Target Sequence/siNA sense region
gaaggagcaacacacagug

SEQ ID NO: 1018 - RNA, 19 nt, Artificial Sequence
  Description of Artificial Sequence:  Target Sequence/siNA sense region
gagcaucgagcucucaugu

SEQ ID NO: 1019 - RNA, 19 nt, Artificial Sequence
  Description of Artificial Sequence:  Target Sequence/siNA sense region
ucugaacucaagauccuca

SEQ ID NO: 1020 - RNA, 19 nt, Artificial Sequence
  Description of Artificial Sequence:  Target Sequence/siNA sense region
auucauauuggucaccauc

SEQ ID NO: 1021 - RNA, 19 nt, Artificial Sequence
  Description of Artificial Sequence:  Target Sequence/siNA sense region
cucaauguggucaaccuuc

SEQ ID NO: 1022 - RNA, 19 nt, Artificial Sequence
  Description of Artificial Sequence:  Target Sequence/siNA sense region
cuaggugccuguaccaagc

SEQ ID NO: 1023 - RNA, 19 nt, Artificial Sequence
  Description of Artificial Sequence:  Target Sequence/siNA sense region
ccaggagggccacucaugg

SEQ ID NO: 1024 - RNA, 19 nt, Artificial Sequence
  Description of Artificial Sequence:  Target Sequence/siNA sense region
gugauuguggaauucugca

SEQ ID NO: 1025 - RNA, 19 nt, Artificial Sequence
  Description of Artificial Sequence:  Target Sequence/siNA sense region
aaauuuggaaaccugucca

SEQ ID NO: 1026 - RNA, 19 nt, Artificial Sequence
  Description of Artificial Sequence:  Target Sequence/siNA sense region
acuuaccugaggagcaaga

SEQ ID NO: 1027 - RNA, 19 nt, Artificial Sequence
  Description of Artificial Sequence:  Target Sequence/siNA sense region
agaaaugaauuuguccccu

SEQ ID NO: 1028 - RNA, 19 nt, Artificial Sequence
  Description of Artificial Sequence:  Target Sequence/siNA sense region
uacaagaccaaaggggcac

SEQ ID NO: 1029 - RNA, 19 nt, Artificial Sequence
  Description of Artificial Sequence:  Target Sequence/siNA sense region
cgauuccgucaagggaaag

SEQ ID NO: 1030 - RNA, 19 nt, Artificial Sequence
  Description of Artificial Sequence:  Target Sequence/siNA sense region
gacuacguuggagcaaucc

SEQ ID NO: 1031 - RNA, 19 nt, Artificial Sequence
  Description of Artificial Sequence:  Target Sequence/siNA sense region
ccuguggaucugaaacggc

SEQ ID NO: 1032 - RNA, 19 nt, Artificial Sequence
  Description of Artificial Sequence:  Target Sequence/siNA sense region
cgcuuggacagcaucacca

SEQ ID NO: 1033 - RNA, 19 nt, Artificial Sequence
  Description of Artificial Sequence:  Target Sequence/siNA sense region
aguagccagagcucagcca

SEQ ID NO: 1034 - RNA, 19 nt, Artificial Sequence
  Description of Artificial Sequence:  Target Sequence/siNA sense region
agcucuggauuuguggagg

SEQ ID NO: 1035 - RNA, 19 nt, Artificial Sequence
  Description of Artificial Sequence:  Target Sequence/siNA sense region
gagaagucccucagugaug

SEQ ID NO: 1036 - RNA, 19 nt, Artificial Sequence
  Description of Artificial Sequence:  Target Sequence/siNA sense region
guagaagaagaggaagcuc

SEQ ID NO: 1037 - RNA, 19 nt, Artificial Sequence
  Description of Artificial Sequence:  Target Sequence/siNA sense region
ccugaagaucuguauaagg

SEQ ID NO: 1038 - RNA, 19 nt, Artificial Sequence
  Description of Artificial Sequence:  Target Sequence/siNA sense region
gacuuccugaccuuggagc

SEQ ID NO: 1039 - RNA, 19 nt, Artificial Sequence
  Description of Artificial Sequence:  Target Sequence/siNA sense region
caucucaucuguuacagcu

SEQ ID NO: 1040 - RNA, 19 nt, Artificial Sequence
  Description of Artificial Sequence:  Target Sequence/siNA sense region
uuccaaguggcuaagggca

SEQ ID NO: 1041 - RNA, 19 nt, Artificial Sequence
  Description of Artificial Sequence:  Target Sequence/siNA sense region
auggaguucuuggcaucgc

SEQ ID NO: 1042 - RNA, 19 nt, Artificial Sequence
  Description of Artificial Sequence:  Target Sequence/siNA sense region
cgaaaguguauccacaggg

SEQ ID NO: 1043 - RNA, 19 nt, Artificial Sequence
  Description of Artificial Sequence:  Target Sequence/siNA sense region
gaccuggcggcacgaaaua

SEQ ID NO: 1044 - RNA, 19 nt, Artificial Sequence
  Description of Artificial Sequence:  Target Sequence/siNA sense region
auccucuuaucggagaaga

SEQ ID NO: 1045 - RNA, 19 nt, Artificial Sequence
  Description of Artificial Sequence:  Target Sequence/siNA sense region
aacgugguuaaaaucugug

SEQ ID NO: 1046 - RNA, 19 nt, Artificial Sequence
  Description of Artificial Sequence:  Target Sequence/siNA sense region
gacuuuggcuuggcccggg

SEQ ID NO: 1047 - RNA, 19 nt, Artificial Sequence
  Description of Artificial Sequence:  Target Sequence/siNA sense region
gauauuuauaaagauccag

SEQ ID NO: 1048 - RNA, 19 nt, Artificial Sequence
  Description of Artificial Sequence:  Target Sequence/siNA sense region
gauuaugucagaaaaggag

SEQ ID NO: 1049 - RNA, 19 nt, Artificial Sequence
  Description of Artificial Sequence:  Target Sequence/siNA sense region
gaugcucgccucccuuuga

SEQ ID NO: 1050 - RNA, 19 nt, Artificial Sequence
  Description of Artificial Sequence:  Target Sequence/siNA sense region
aaauggauggccccagaaa

SEQ ID NO: 1051 - RNA, 19 nt, Artificial Sequence
  Description of Artificial Sequence:  Target Sequence/siNA sense region
acaauuuuugacagagugu

SEQ ID NO: 1052 - RNA, 19 nt, Artificial Sequence
  Description of Artificial Sequence:  Target Sequence/siNA sense region
uacacaauccagagugacg

SEQ ID NO: 1053 - RNA, 19 nt, Artificial Sequence
  Description of Artificial Sequence:  Target Sequence/siNA sense region
gucuggucuuuugguguuu

SEQ ID NO: 1054 - RNA, 19 nt, Artificial Sequence
  Description of Artificial Sequence:  Target Sequence/siNA sense region
uugcugugggaaauauuuu

SEQ ID NO: 1055 - RNA, 19 nt, Artificial Sequence
  Description of Artificial Sequence:  Target Sequence/siNA sense region
uccuuaggugcuucuccau

SEQ ID NO: 1056 - RNA, 19 nt, Artificial Sequence
  Description of Artificial Sequence:  Target Sequence/siNA sense region
uauccugggguaaagauug

SEQ ID NO: 1057 - RNA, 19 nt, Artificial Sequence
  Description of Artificial Sequence:  Target Sequence/siNA sense region
gaugaagaauuuuguaggc

SEQ ID NO: 1058 - RNA, 19 nt, Artificial Sequence
  Description of Artificial Sequence:  Target Sequence/siNA sense region
cgauugaaagaaggaacua

SEQ ID NO: 1059 - RNA, 19 nt, Artificial Sequence
  Description of Artificial Sequence:  Target Sequence/siNA sense region
agaaugagggccccugauu

SEQ ID NO: 1060 - RNA, 19 nt, Artificial Sequence
  Description of Artificial Sequence:  Target Sequence/siNA sense region
uauacuacaccagaaaugu

SEQ ID NO: 1061 - RNA, 19 nt, Artificial Sequence
  Description of Artificial Sequence:  Target Sequence/siNA sense region
uaccagaccaugcuggacu

SEQ ID NO: 1062 - RNA, 19 nt, Artificial Sequence
  Description of Artificial Sequence:  Target Sequence/siNA sense region
ugcuggcacggggagccca

SEQ ID NO: 1063 - RNA, 19 nt, Artificial Sequence
  Description of Artificial Sequence:  Target Sequence/siNA sense region
agucagagacccacguuuu

SEQ ID NO: 1064 - RNA, 19 nt, Artificial Sequence
  Description of Artificial Sequence:  Target Sequence/siNA sense region
ucagaguugguggaacauu

SEQ ID NO: 1065 - RNA, 19 nt, Artificial Sequence
  Description of Artificial Sequence:  Target Sequence/siNA sense region
uugggaaaucucuugcaag

SEQ ID NO: 1066 - RNA, 19 nt, Artificial Sequence
  Description of Artificial Sequence:  Target Sequence/siNA sense region
gcuaaugcucagcaggaug

SEQ ID NO: 1067 - RNA, 19 nt, Artificial Sequence
  Description of Artificial Sequence:  Target Sequence/siNA sense region
ggcaaagacuacauuguuc

SEQ ID NO: 1068 - RNA, 19 nt, Artificial Sequence
  Description of Artificial Sequence:  Target Sequence/siNA sense region
cuuccgauaucagagacuu

SEQ ID NO: 1069 - RNA, 19 nt, Artificial Sequence
  Description of Artificial Sequence:  Target Sequence/siNA sense region
uugagcauggaagaggauu

SEQ ID NO: 1070 - RNA, 19 nt, Artificial Sequence
  Description of Artificial Sequence:  Target Sequence/siNA sense region
ucuggacucucucugccua

SEQ ID NO: 1071 - RNA, 19 nt, Artificial Sequence
  Description of Artificial Sequence:  Target Sequence/siNA sense region
accucaccuguuuccugua

SEQ ID NO: 1072 - RNA, 19 nt, Artificial Sequence
  Description of Artificial Sequence:  Target Sequence/siNA sense region
auggaggaggaggaaguau

SEQ ID NO: 1073 - RNA, 19 nt, Artificial Sequence
  Description of Artificial Sequence:  Target Sequence/siNA sense region
ugugaccccaaauuccauu

SEQ ID NO: 1074 - RNA, 19 nt, Artificial Sequence
  Description of Artificial Sequence:  Target Sequence/siNA sense region
uaugacaacacagcaggaa

SEQ ID NO: 1075 - RNA, 19 nt, Artificial Sequence
  Description of Artificial Sequence:  Target Sequence/siNA sense region
aucagucaguaucugcaga

SEQ ID NO: 1076 - RNA, 19 nt, Artificial Sequence
  Description of Artificial Sequence:  Target Sequence/siNA sense region
aacaguaagcgaaagagcc

SEQ ID NO: 1077 - RNA, 19 nt, Artificial Sequence
  Description of Artificial Sequence:  Target Sequence/siNA sense region
cggccugugaguguaaaaa

SEQ ID NO: 1078 - RNA, 19 nt, Artificial Sequence
  Description of Artificial Sequence:  Target Sequence/siNA sense region
acauuugaagauaucccgu

SEQ ID NO: 1079 - RNA, 19 nt, Artificial Sequence
  Description of Artificial Sequence:  Target Sequence/siNA sense region
uuagaagaaccagaaguaa

SEQ ID NO: 1080 - RNA, 19 nt, Artificial Sequence
  Description of Artificial Sequence:  Target Sequence/siNA sense region
aaaguaaucccagaugaca

SEQ ID NO: 1081 - RNA, 19 nt, Artificial Sequence
  Description of Artificial Sequence:  Target Sequence/siNA sense region
aaccagacggacaguggua

SEQ ID NO: 1082 - RNA, 19 nt, Artificial Sequence
  Description of Artificial Sequence:  Target Sequence/siNA sense region
augguucuugccucagaag

SEQ ID NO: 1083 - RNA, 19 nt, Artificial Sequence
  Description of Artificial Sequence:  Target Sequence/siNA sense region
gagcugaaaacuuuggaag

SEQ ID NO: 1084 - RNA, 19 nt, Artificial Sequence
  Description of Artificial Sequence:  Target Sequence/siNA sense region
gacagaaccaaauuaucuc

SEQ ID NO: 1085 - RNA, 19 nt, Artificial Sequence
  Description of Artificial Sequence:  Target Sequence/siNA sense region
ccaucuuuugguggaaugg

SEQ ID NO: 1086 - RNA, 19 nt, Artificial Sequence
  Description of Artificial Sequence:  Target Sequence/siNA sense region
gugcccagcaaaagcaggg

SEQ ID NO: 1087 - RNA, 19 nt, Artificial Sequence
  Description of Artificial Sequence:  Target Sequence/siNA sense region
gagucuguggcaucugaag

SEQ ID NO: 1088 - RNA, 19 nt, Artificial Sequence
  Description of Artificial Sequence:  Target Sequence/siNA sense region
ggcucaaaccagacaagcg

SEQ ID NO: 1089 - RNA, 19 nt, Artificial Sequence
  Description of Artificial Sequence:  Target Sequence/siNA sense region
ggcuaccaguccggauauc

SEQ ID NO: 1090 - RNA, 19 nt, Artificial Sequence
  Description of Artificial Sequence:  Target Sequence/siNA sense region
cacuccgaugacacagaca

SEQ ID NO: 1091 - RNA, 19 nt, Artificial Sequence
  Description of Artificial Sequence:  Target Sequence/siNA sense region
accaccguguacuccagug

SEQ ID NO: 1092 - RNA, 19 nt, Artificial Sequence
  Description of Artificial Sequence:  Target Sequence/siNA sense region
gaggaagcagaacuuuuaa

SEQ ID NO: 1093 - RNA, 19 nt, Artificial Sequence
  Description of Artificial Sequence:  Target Sequence/siNA sense region
aagcugauagagauuggag

SEQ ID NO: 1094 - RNA, 19 nt, Artificial Sequence
  Description of Artificial Sequence:  Target Sequence/siNA sense region
gugcaaaccgguagcacag

SEQ ID NO: 1095 - RNA, 19 nt, Artificial Sequence
  Description of Artificial Sequence:  Target Sequence/siNA sense region
gcccagauucuccagccug

SEQ ID NO: 1096 - RNA, 19 nt, Artificial Sequence
  Description of Artificial Sequence:  Target Sequence/siNA sense region
gacucggggaccacacuga

SEQ ID NO: 1097 - RNA, 19 nt, Artificial Sequence
  Description of Artificial Sequence:  Target Sequence/siNA sense region
agcucuccuccuguuuaaa

SEQ ID NO: 1098 - RNA, 19 nt, Artificial Sequence
  Description of Artificial Sequence:  Target Sequence/siNA sense region
aaggaagcauccacacccc

SEQ ID NO: 1099 - RNA, 19 nt, Artificial Sequence
  Description of Artificial Sequence:  Target Sequence/siNA sense region
caacucccggacaucacau

SEQ ID NO: 1100 - RNA, 19 nt, Artificial Sequence
  Description of Artificial Sequence:  Target Sequence/siNA sense region
ugagaggucugcucagauu

SEQ ID NO: 1101 - RNA, 19 nt, Artificial Sequence
  Description of Artificial Sequence:  Target Sequence/siNA sense region
uuugaaguguuguucuuuc

SEQ ID NO: 1102 - RNA, 19 nt, Artificial Sequence
  Description of Artificial Sequence:  Target Sequence/siNA sense region
ccaccagcaggaaguagcc

SEQ ID NO: 1103 - RNA, 19 nt, Artificial Sequence
  Description of Artificial Sequence:  Target Sequence/siNA sense region
cgcauuugauuuucauuuc

SEQ ID NO: 1104 - RNA, 19 nt, Artificial Sequence
  Description of Artificial Sequence:  Target Sequence/siNA sense region
cgacaacagaaaaaggacc

SEQ ID NO: 1105 - RNA, 19 nt, Artificial Sequence
  Description of Artificial Sequence:  Target Sequence/siNA sense region
cucggacugcagggagcca

SEQ ID NO: 1106 - RNA, 19 nt, Artificial Sequence
  Description of Artificial Sequence:  Target Sequence/siNA sense region
agucuucuaggcauauccu

SEQ ID NO: 1107 - RNA, 19 nt, Artificial Sequence
  Description of Artificial Sequence:  Target Sequence/siNA sense region
uggaagaggcuugugaccc

SEQ ID NO: 1108 - RNA, 19 nt, Artificial Sequence
  Description of Artificial Sequence:  Target Sequence/siNA sense region
caagaaugugucugugucu

SEQ ID NO: 1109 - RNA, 19 nt, Artificial Sequence
  Description of Artificial Sequence:  Target Sequence/siNA sense region
uucucccaguguugaccug

SEQ ID NO: 1110 - RNA, 19 nt, Artificial Sequence
  Description of Artificial Sequence:  Target Sequence/siNA sense region
gauccucuuuuuucauuca

SEQ ID NO: 1111 - RNA, 19 nt, Artificial Sequence
  Description of Artificial Sequence:  Target Sequence/siNA sense region
auuuaaaaagcauuaucau

SEQ ID NO: 1112 - RNA, 19 nt, Artificial Sequence
  Description of Artificial Sequence:  Target Sequence/siNA sense region
ugccccugcugcgggucuc

SEQ ID NO: 1113 - RNA, 19 nt, Artificial Sequence
  Description of Artificial Sequence:  Target Sequence/siNA sense region
caccauggguuuagaacaa

SEQ ID NO: 1114 - RNA, 19 nt, Artificial Sequence
  Description of Artificial Sequence:  Target Sequence/siNA sense region
aagagcuucaagcaauggc

SEQ ID NO: 1115 - RNA, 19 nt, Artificial Sequence
  Description of Artificial Sequence:  Target Sequence/siNA sense region
ccccauccucaaagaagua

SEQ ID NO: 1116 - RNA, 19 nt, Artificial Sequence
  Description of Artificial Sequence:  Target Sequence/siNA sense region
agcaguaccuggggagcug

SEQ ID NO: 1117 - RNA, 19 nt, Artificial Sequence
  Description of Artificial Sequence:  Target Sequence/siNA sense region
gacacuucuguaaaacuag

SEQ ID NO: 1118 - RNA, 19 nt, Artificial Sequence
  Description of Artificial Sequence:  Target Sequence/siNA sense region
gaagauaaaccaggcaacg

SEQ ID NO: 1119 - RNA, 19 nt, Artificial Sequence
  Description of Artificial Sequence:  Target Sequence/siNA sense region
guaaguguucgagguguug

SEQ ID NO: 1120 - RNA, 19 nt, Artificial Sequence
  Description of Artificial Sequence:  Target Sequence/siNA sense region
gaagaugggaaggauuugc

SEQ ID NO: 1121 - RNA, 19 nt, Artificial Sequence
  Description of Artificial Sequence:  Target Sequence/siNA sense region
cagggcugagucuauccaa

SEQ ID NO: 1122 - RNA, 19 nt, Artificial Sequence
  Description of Artificial Sequence:  Target Sequence/siNA sense region
agaggcuuuguuuaggacg

SEQ ID NO: 1123 - RNA, 19 nt, Artificial Sequence
  Description of Artificial Sequence:  Target Sequence/siNA sense region
gugggucccaagccaagcc

SEQ ID NO: 1124 - RNA, 19 nt, Artificial Sequence
  Description of Artificial Sequence:  Target Sequence/siNA sense region
cuuaaguguggaauucgga

SEQ ID NO: 1125 - RNA, 19 nt, Artificial Sequence
  Description of Artificial Sequence:  Target Sequence/siNA sense region
auugauagaaaggaagacu

SEQ ID NO: 1126 - RNA, 19 nt, Artificial Sequence
  Description of Artificial Sequence:  Target Sequence/siNA sense region
uaacguuaccuugcuuugg

SEQ ID NO: 1127 - RNA, 19 nt, Artificial Sequence
  Description of Artificial Sequence:  Target Sequence/siNA sense region
gagaguacuggagccugca

SEQ ID NO: 1128 - RNA, 19 nt, Artificial Sequence
  Description of Artificial Sequence:  Target Sequence/siNA sense region
aaaugcauuguguuugcuc

SEQ ID NO: 1129 - RNA, 19 nt, Artificial Sequence
  Description of Artificial Sequence:  Target Sequence/siNA sense region
cugguggaggugggcaugg

SEQ ID NO: 1130 - RNA, 19 nt, Artificial Sequence
  Description of Artificial Sequence:  Target Sequence/siNA sense region
gggucuguucugaaaugua

SEQ ID NO: 1131 - RNA, 19 nt, Artificial Sequence
  Description of Artificial Sequence:  Target Sequence/siNA sense region
aaaggguucagacgggguu

SEQ ID NO: 1132 - RNA, 19 nt, Artificial Sequence
  Description of Artificial Sequence:  Target Sequence/siNA sense region
uucugguuuuagaagguug

SEQ ID NO: 1133 - RNA, 19 nt, Artificial Sequence
  Description of Artificial Sequence:  Target Sequence/siNA sense region
gcguguucuucgaguuggg

SEQ ID NO: 1134 - RNA, 19 nt, Artificial Sequence
  Description of Artificial Sequence:  Target Sequence/siNA sense region
gcuaaaguagaguucguug

SEQ ID NO: 1135 - RNA, 19 nt, Artificial Sequence
  Description of Artificial Sequence:  Target Sequence/siNA sense region
gugcuguuucugacuccua

SEQ ID NO: 1136 - RNA, 19 nt, Artificial Sequence
  Description of Artificial Sequence:  Target Sequence/siNA sense region
aaugagaguuccuuccaga

SEQ ID NO: 1137 - RNA, 19 nt, Artificial Sequence
  Description of Artificial Sequence:  Target Sequence/siNA sense region
accguuagcugucuccuug

SEQ ID NO: 1138 - RNA, 19 nt, Artificial Sequence
  Description of Artificial Sequence:  Target Sequence/siNA sense region
gccaagccccaggaagaaa

SEQ ID NO: 1139 - RNA, 19 nt, Artificial Sequence
  Description of Artificial Sequence:  Target Sequence/siNA sense region
aaugaugcagcucuggcuc

SEQ ID NO: 1140 - RNA, 19 nt, Artificial Sequence
  Description of Artificial Sequence:  Target Sequence/siNA sense region
ccuugucucccaggcugau

SEQ ID NO: 1141 - RNA, 19 nt, Artificial Sequence
  Description of Artificial Sequence:  Target Sequence/siNA sense region
uccuuuauucagaauacca

SEQ ID NO: 1142 - RNA, 19 nt, Artificial Sequence
  Description of Artificial Sequence:  Target Sequence/siNA sense region
acaaagaaaggacauucag

SEQ ID NO: 1143 - RNA, 19 nt, Artificial Sequence
  Description of Artificial Sequence:  Target Sequence/siNA sense region
gcucaaggcucccugccgu

SEQ ID NO: 1144 - RNA, 19 nt, Artificial Sequence
  Description of Artificial Sequence:  Target Sequence/siNA sense region
uguugaagaguucugacug

SEQ ID NO: 1145 - RNA, 19 nt, Artificial Sequence
  Description of Artificial Sequence:  Target Sequence/siNA sense region
gcacaaaccagcuucuggu

SEQ ID NO: 1146 - RNA, 19 nt, Artificial Sequence
  Description of Artificial Sequence:  Target Sequence/siNA sense region
uuucuucuggaaugaauac

SEQ ID NO: 1147 - RNA, 19 nt, Artificial Sequence
  Description of Artificial Sequence:  Target Sequence/siNA sense region
cccucauaucuguccugau

SEQ ID NO: 1148 - RNA, 19 nt, Artificial Sequence
  Description of Artificial Sequence:  Target Sequence/siNA sense region
ugugauaugucugagacug

SEQ ID NO: 1149 - RNA, 19 nt, Artificial Sequence
  Description of Artificial Sequence:  Target Sequence/siNA sense region
gaaugcgggagguucaaug

SEQ ID NO: 1150 - RNA, 19 nt, Artificial Sequence
  Description of Artificial Sequence:  Target Sequence/siNA sense region
gugaagcuguguguggugu

SEQ ID NO: 1151 - RNA, 19 nt, Artificial Sequence
  Description of Artificial Sequence:  Target Sequence/siNA sense region
ucaaaguuucaggaaggau

SEQ ID NO: 1152 - RNA, 19 nt, Artificial Sequence
  Description of Artificial Sequence:  Target Sequence/siNA sense region
uuuuacccuuuuguucuuc

SEQ ID NO: 1153 - RNA, 19 nt, Artificial Sequence
  Description of Artificial Sequence:  Target Sequence/siNA sense region
cccccuguccccaacccac

SEQ ID NO: 1154 - RNA, 19 nt, Artificial Sequence
  Description of Artificial Sequence:  Target Sequence/siNA sense region
cucucaccccgcaacccau

SEQ ID NO: 1155 - RNA, 19 nt, Artificial Sequence
  Description of Artificial Sequence:  Target Sequence/siNA sense region
ucaguauuuuaguuauuug

SEQ ID NO: 1156 - RNA, 19 nt, Artificial Sequence
  Description of Artificial Sequence:  Target Sequence/siNA sense region
ggccucuacuccaguaaac

SEQ ID NO: 1157 - RNA, 19 nt, Artificial Sequence
  Description of Artificial Sequence:  Target Sequence/siNA sense region
ccugauuggguuuguucac

SEQ ID NO: 1158 - RNA, 19 nt, Artificial Sequence
  Description of Artificial Sequence:  Target Sequence/siNA sense region
cucucugaaugauuauuag

SEQ ID NO: 1159 - RNA, 19 nt, Artificial Sequence
  Description of Artificial Sequence:  Target Sequence/siNA sense region
gccagacuucaaaauuauu

SEQ ID NO: 1160 - RNA, 19 nt, Artificial Sequence
  Description of Artificial Sequence:  Target Sequence/siNA sense region
uuuauagcccaaauuauaa

SEQ ID NO: 1161 - RNA, 19 nt, Artificial Sequence
  Description of Artificial Sequence:  Target Sequence/siNA sense region
acaucuauuguauuauuua

SEQ ID NO: 1162 - RNA, 19 nt, Artificial Sequence
  Description of Artificial Sequence:  Target Sequence/siNA sense region
agacuuuuaacauauagag

SEQ ID NO: 1163 - RNA, 19 nt, Artificial Sequence
  Description of Artificial Sequence:  Target Sequence/siNA sense region
gcuauuucuacugauuuuu

SEQ ID NO: 1164 - RNA, 19 nt, Artificial Sequence
  Description of Artificial Sequence:  Target Sequence/siNA sense region
ugcccuuguucuguccuuu

SEQ ID NO: 1165 - RNA, 19 nt, Artificial Sequence
  Description of Artificial Sequence:  Target Sequence/siNA sense region
uuuuucaaaaaagaaaaug

SEQ ID NO: 1166 - RNA, 19 nt, Artificial Sequence
  Description of Artificial Sequence:  Target Sequence/siNA sense region
guguuuuuuguuugguacc

SEQ ID NO: 1167 - RNA, 19 nt, Artificial Sequence
  Description of Artificial Sequence:  Target Sequence/siNA sense region
cauagugugaaaugcuggg

SEQ ID NO: 1168 - RNA, 19 nt, Artificial Sequence
  Description of Artificial Sequence:  Target Sequence/siNA sense region
gaacaaugacuauaagaca

SEQ ID NO: 1169 - RNA, 19 nt, Artificial Sequence
  Description of Artificial Sequence:  Target Sequence/siNA sense region
augcuauggcacauauauu

SEQ ID NO: 1170 - RNA, 19 nt, Artificial Sequence
  Description of Artificial Sequence:  Target Sequence/siNA sense region
uuauagucuguuuauguag

SEQ ID NO: 1171 - RNA, 19 nt, Artificial Sequence
  Description of Artificial Sequence:  Target Sequence/siNA sense region
gaaacaaauguaauauauu

SEQ ID NO: 1172 - RNA, 19 nt, Artificial Sequence
  Description of Artificial Sequence:  Target Sequence/siNA sense region
uaaagccuuauauauaaug

SEQ ID NO: 1173 - RNA, 19 nt, Artificial Sequence
  Description of Artificial Sequence:  Target Sequence/siNA sense region
gaacuuuguacuauucaca

SEQ ID NO: 1174 - RNA, 19 nt, Artificial Sequence
  Description of Artificial Sequence:  Target Sequence/siNA sense region
auuuuguaucaguauuaug

SEQ ID NO: 1175 - RNA, 19 nt, Artificial Sequence
  Description of Artificial Sequence:  Target Sequence/siNA sense region
guagcauaacaaaggucau

SEQ ID NO: 1176 - RNA, 19 nt, Artificial Sequence
  Description of Artificial Sequence:  Target Sequence/siNA sense region
uaaugcuuucagcaauuga

SEQ ID NO: 1177 - RNA, 19 nt, Artificial Sequence
  Description of Artificial Sequence:  Target Sequence/siNA sense region
augucauuuuauuaaagaa

SEQ ID NO: 1178 - RNA, 19 nt, Artificial Sequence
  Description of Artificial Sequence:  Target Sequence/siNA sense region
agaacauugaaaaacuuga

SEQ ID NO: 1179 - RNA, 19 nt, Artificial Sequence
  Description of Artificial Sequence:  siNA antisense region
cggggucccgggacucagu

SEQ ID NO: 1180 - RNA, 19 nt, Artificial Sequence
  Description of Artificial Sequence:  siNA antisense region
acacacugaccgcucuccc

SEQ ID NO: 1181 - RNA, 19 nt, Artificial Sequence
  Description of Artificial Sequence:  siNA antisense region
agaggaaacgcagcgacca

SEQ ID NO: 1182 - RNA, 19 nt, Artificial Sequence
  Description of Artificial Sequence:  siNA antisense region
gugaugcccggcgcaggca

SEQ ID NO: 1183 - RNA, 19 nt, Artificial Sequence
  Description of Artificial Sequence:  siNA antisense region
acuuucugcggcgcgcaag

SEQ ID NO: 1184 - RNA, 19 nt, Artificial Sequence
  Description of Artificial Sequence:  siNA antisense region
auccaggcugccagacgga

SEQ ID NO: 1185 - RNA, 19 nt, Artificial Sequence
  Description of Artificial Sequence:  siNA antisense region
gugccgguaggagaggaua

SEQ ID NO: 1186 - RNA, 19 nt, Artificial Sequence
  Description of Artificial Sequence:  siNA antisense region
cugcaggggcgucugcggg

SEQ ID NO: 1187 - RNA, 19 nt, Artificial Sequence
  Description of Artificial Sequence:  siNA antisense region
ccgggcgccgaccggcggc

SEQ ID NO: 1188 - RNA, 19 nt, Artificial Sequence
  Description of Artificial Sequence:  siNA antisense region
cgcacagggcuagggagcc

SEQ ID NO: 1189 - RNA, 19 nt, Artificial Sequence
  Description of Artificial Sequence:  siNA antisense region
cagcgcaggacaguugagc

SEQ ID NO: 1190 - RNA, 19 nt, Artificial Sequence
  Description of Artificial Sequence:  siNA antisense region
ggaacucgcggcaccccgc

SEQ ID NO: 1191 - RNA, 19 nt, Artificial Sequence
  Description of Artificial Sequence:  siNA antisense region
agaaggaggcgcggaggug

SEQ ID NO: 1192 - RNA, 19 nt, Artificial Sequence
  Description of Artificial Sequence:  siNA antisense region
cucccagcgccugucuaga

SEQ ID NO: 1193 - RNA, 19 nt, Artificial Sequence
  Description of Artificial Sequence:  siNA antisense region
cucgggagccgguucuuuc

SEQ ID NO: 1194 - RNA, 19 nt, Artificial Sequence
  Description of Artificial Sequence:  siNA antisense region
cgggcgaaaugcccagaac

SEQ ID NO: 1195 - RNA, 19 nt, Artificial Sequence
  Description of Artificial Sequence:  siNA antisense region
gcauccugcaccucgagcc

SEQ ID NO: 1196 - RNA, 19 nt, Artificial Sequence
  Description of Artificial Sequence:  siNA antisense region
ccagcagcaccuugcucug

SEQ ID NO: 1197 - RNA, 19 nt, Artificial Sequence
  Description of Artificial Sequence:  siNA antisense region
agagccacagggcgacggc

SEQ ID NO: 1198 - RNA, 19 nt, Artificial Sequence
  Description of Artificial Sequence:  siNA antisense region
cggcccgggucuccacgca

SEQ ID NO: 1199 - RNA, 19 nt, Artificial Sequence
  Description of Artificial Sequence:  siNA antisense region
uaggcaaacccacagaggc

SEQ ID NO: 1200 - RNA, 19 nt, Artificial Sequence
  Description of Artificial Sequence:  siNA antisense region
gcagaucaagagaaacacu

SEQ ID NO: 1201 - RNA, 19 nt, Artificial Sequence
  Description of Artificial Sequence:  siNA antisense region
uuuguaugcugagccuggg

SEQ ID NO: 1202 - RNA, 19 nt, Artificial Sequence
  Description of Artificial Sequence:  siNA antisense region
uaauuguaaguaugucuuu

SEQ ID NO: 1203 - RNA, 19 nt, Artificial Sequence
  Description of Artificial Sequence:  siNA antisense region
gaagaguuguauuagccuu

SEQ ID NO: 1204 - RNA, 19 nt, Artificial Sequence
  Description of Artificial Sequence:  siNA antisense region
guccccugcaaguaauuug

SEQ ID NO: 1205 - RNA, 19 nt, Artificial Sequence
  Description of Artificial Sequence:  siNA antisense region
gccaguccaagucccucug

SEQ ID NO: 1206 - RNA, 19 nt, Artificial Sequence
  Description of Artificial Sequence:  siNA antisense region
ucugauuauugggccaaag

SEQ ID NO: 1207 - RNA, 19 nt, Artificial Sequence
  Description of Artificial Sequence:  siNA antisense region
cccuuugcucacugccacu

SEQ ID NO: 1208 - RNA, 19 nt, Artificial Sequence
  Description of Artificial Sequence:  siNA antisense region
ugcacucagucaccuccac

SEQ ID NO: 1209 - RNA, 19 nt, Artificial Sequence
  Description of Artificial Sequence:  siNA antisense region
uacagaagaggccaucgcu

SEQ ID NO: 1210 - RNA, 19 nt, Artificial Sequence
  Description of Artificial Sequence:  siNA antisense region
uuggaauugugagugucuu

SEQ ID NO: 1211 - RNA, 19 nt, Artificial Sequence
  Description of Artificial Sequence:  siNA antisense region
ugucauuuccgaucacuuu

SEQ ID NO: 1212 - RNA, 19 nt, Artificial Sequence
  Description of Artificial Sequence:  siNA antisense region
agcacuuguaggcuccagu

SEQ ID NO: 1213 - RNA, 19 nt, Artificial Sequence
  Description of Artificial Sequence:  siNA antisense region
agucaguuucccgguagaa

SEQ ID NO: 1214 - RNA, 19 nt, Artificial Sequence
  Description of Artificial Sequence:  siNA antisense region
cauaaaugaccgaggccaa

SEQ ID NO: 1215 - RNA, 19 nt, Artificial Sequence
  Description of Artificial Sequence:  siNA antisense region
uguaaucuugaacauagac

SEQ ID NO: 1216 - RNA, 19 nt, Artificial Sequence
  Description of Artificial Sequence:  siNA antisense region
aagcaauaaauggagaucu

SEQ ID NO: 1217 - RNA, 19 nt, Artificial Sequence
  Description of Artificial Sequence:  siNA antisense region
cauguuggucacuaacaga

SEQ ID NO: 1218 - RNA, 19 nt, Artificial Sequence
  Description of Artificial Sequence:  siNA antisense region
caguaauguacacgacucc

SEQ ID NO: 1219 - RNA, 19 nt, Artificial Sequence
  Description of Artificial Sequence:  siNA antisense region
caguuuuguuuuuguucuc

SEQ ID NO: 1220 - RNA, 19 nt, Artificial Sequence
  Description of Artificial Sequence:  siNA antisense region
cgagacauggaaucaccac

SEQ ID NO: 1221 - RNA, 19 nt, Artificial Sequence
  Description of Artificial Sequence:  siNA antisense region
ugagauuugaaauggaccc

SEQ ID NO: 1222 - RNA, 19 nt, Artificial Sequence
  Description of Artificial Sequence:  siNA antisense region
uugcacaaagugacacguu

SEQ ID NO: 1223 - RNA, 19 nt, Artificial Sequence
  Description of Artificial Sequence:  siNA antisense region
aucucuuuucuggguaucu

SEQ ID NO: 1224 - RNA, 19 nt, Artificial Sequence
  Description of Artificial Sequence:  siNA antisense region
uguuaccaucaggaacaaa

SEQ ID NO: 1225 - RNA, 19 nt, Artificial Sequence
  Description of Artificial Sequence:  siNA antisense region
ugcugucccaggaaauucu

SEQ ID NO: 1226 - RNA, 19 nt, Artificial Sequence
  Description of Artificial Sequence:  siNA antisense region
gaauaguaaagcccuucuu

SEQ ID NO: 1227 - RNA, 19 nt, Artificial Sequence
  Description of Artificial Sequence:  siNA antisense region
agcugaucauguagcuggg

SEQ ID NO: 1228 - RNA, 19 nt, Artificial Sequence
  Description of Artificial Sequence:  siNA antisense region
agaagaccaugccagcaua

SEQ ID NO: 1229 - RNA, 19 nt, Artificial Sequence
  Description of Artificial Sequence:  siNA antisense region
cauuaauuuuugcuucaca

SEQ ID NO: 1230 - RNA, 19 nt, Artificial Sequence
  Description of Artificial Sequence:  siNA antisense region
uagacugguaacuuucauc

SEQ ID NO: 1231 - RNA, 19 nt, Artificial Sequence
  Description of Artificial Sequence:  siNA antisense region
cgacaacuauguacauaau

SEQ ID NO: 1232 - RNA, 19 nt, Artificial Sequence
  Description of Artificial Sequence:  siNA antisense region
aaauccuauacccuacaac

SEQ ID NO: 1233 - RNA, 19 nt, Artificial Sequence
  Description of Artificial Sequence:  siNA antisense region
gacucagaaccacaucaua

SEQ ID NO: 1234 - RNA, 19 nt, Artificial Sequence
  Description of Artificial Sequence:  siNA antisense region
guucaauuccaugagacgg

SEQ ID NO: 1235 - RNA, 19 nt, Artificial Sequence
  Description of Artificial Sequence:  siNA antisense region
gcuuuucuccaacagauag

SEQ ID NO: 1236 - RNA, 19 nt, Artificial Sequence
  Description of Artificial Sequence:  siNA antisense region
cuguacaauuuaagacaag

SEQ ID NO: 1237 - RNA, 19 nt, Artificial Sequence
  Description of Artificial Sequence:  siNA antisense region
cauuuaguucaguucuugc

SEQ ID NO: 1238 - RNA, 19 nt, Artificial Sequence
  Description of Artificial Sequence:  siNA antisense region
aguugaagucaauccccac

SEQ ID NO: 1239 - RNA, 19 nt, Artificial Sequence
  Description of Artificial Sequence:  siNA antisense region
ucgaagaaggguauuccca

SEQ ID NO: 1240 - RNA, 19 nt, Artificial Sequence
  Description of Artificial Sequence:  siNA antisense region
guuucuuaugcugaugcuu

SEQ ID NO: 1241 - RNA, 19 nt, Artificial Sequence
  Description of Artificial Sequence:  siNA antisense region
uuaggucucgguuuacaag

SEQ ID NO: 1242 - RNA, 19 nt, Artificial Sequence
  Description of Artificial Sequence:  siNA antisense region
cacucccagacuggguuuu

SEQ ID NO: 1243 - RNA, 19 nt, Artificial Sequence
  Description of Artificial Sequence:  siNA antisense region
ucaaaaauuucuucaucuc

SEQ ID NO: 1244 - RNA, 19 nt, Artificial Sequence
  Description of Artificial Sequence:  siNA antisense region
caucuauaguuaaggugcu

SEQ ID NO: 1245 - RNA, 19 nt, Artificial Sequence
  Description of Artificial Sequence:  siNA antisense region
ggucacuccggguuacacc

SEQ ID NO: 1246 - RNA, 19 nt, Artificial Sequence
  Description of Artificial Sequence:  siNA antisense region
cacagguguacaauccuug

SEQ ID NO: 1247 - RNA, 19 nt, Artificial Sequence
  Description of Artificial Sequence:  siNA antisense region
ucagcccacuggaugcugc

SEQ ID NO: 1248 - RNA, 19 nt, Artificial Sequence
  Description of Artificial Sequence:  siNA antisense region
ugcuguucuucuuggucau

SEQ ID NO: 1249 - RNA, 19 nt, Artificial Sequence
  Description of Artificial Sequence:  siNA antisense region
cauggacccugacaaaugu

SEQ ID NO: 1250 - RNA, 19 nt, Artificial Sequence
  Description of Artificial Sequence:  siNA antisense region
aagcaacaaaagguuuuuc

SEQ ID NO: 1251 - RNA, 19 nt, Artificial Sequence
  Description of Artificial Sequence:  siNA antisense region
auuccaugccacuuccaaa

SEQ ID NO: 1252 - RNA, 19 nt, Artificial Sequence
  Description of Artificial Sequence:  siNA antisense region
ccguggcuuccaccagaga

SEQ ID NO: 1253 - RNA, 19 nt, Artificial Sequence
  Description of Artificial Sequence:  siNA antisense region
uucugacacgcucccccac

SEQ ID NO: 1254 - RNA, 19 nt, Artificial Sequence
  Description of Artificial Sequence:  siNA antisense region
caagguacuucgcagggau

SEQ ID NO: 1255 - RNA, 19 nt, Artificial Sequence
  Description of Artificial Sequence:  siNA antisense region
uuucuggggguggguaacc

SEQ ID NO: 1256 - RNA, 19 nt, Artificial Sequence
  Description of Artificial Sequence:  siNA antisense region
cauuuuuauaccauuuuau

SEQ ID NO: 1257 - RNA, 19 nt, Artificial Sequence
  Description of Artificial Sequence:  siNA antisense region
uggacucaagggguauucc

SEQ ID NO: 1258 - RNA, 19 nt, Artificial Sequence
  Description of Artificial Sequence:  siNA antisense region
ccgcuuuaauugugugauu

SEQ ID NO: 1259 - RNA, 19 nt, Artificial Sequence
  Description of Artificial Sequence:  siNA antisense region
uaaucgucaguacaugccc

SEQ ID NO: 1260 - RNA, 19 nt, Artificial Sequence
  Description of Artificial Sequence:  siNA antisense region
cucuuucacucacuuccau

SEQ ID NO: 1261 - RNA, 19 nt, Artificial Sequence
  Description of Artificial Sequence:  siNA antisense region
caguguaauuuccuguguc

SEQ ID NO: 1262 - RNA, 19 nt, Artificial Sequence
  Description of Artificial Sequence:  siNA antisense region
ugggauugguaaggaugac

SEQ ID NO: 1263 - RNA, 19 nt, Artificial Sequence
  Description of Artificial Sequence:  siNA antisense region
ucugcuucuccuuugaaau

SEQ ID NO: 1264 - RNA, 19 nt, Artificial Sequence
  Description of Artificial Sequence:  siNA antisense region
ccagagagaccacauggcu

SEQ ID NO: 1265 - RNA, 19 nt, Artificial Sequence
  Description of Artificial Sequence:  siNA antisense region
ggggugggacauacacaac

SEQ ID NO: 1266 - RNA, 19 nt, Artificial Sequence
  Description of Artificial Sequence:  siNA antisense region
gagauuucucaccaaucug

SEQ ID NO: 1267 - RNA, 19 nt, Artificial Sequence
  Description of Artificial Sequence:  siNA antisense region
aauccacaggagagauuag

SEQ ID NO: 1268 - RNA, 19 nt, Artificial Sequence
  Description of Artificial Sequence:  siNA antisense region
uggugccguacugguagga

SEQ ID NO: 1269 - RNA, 19 nt, Artificial Sequence
  Description of Artificial Sequence:  siNA antisense region
uacaugucagcguuugagu

SEQ ID NO: 1270 - RNA, 19 nt, Artificial Sequence
  Description of Artificial Sequence:  siNA antisense region
gaggaauggcauagaccgu

SEQ ID NO: 1271 - RNA, 19 nt, Artificial Sequence
  Description of Artificial Sequence:  siNA antisense region
aguggaugugaugcggggg

SEQ ID NO: 1272 - RNA, 19 nt, Artificial Sequence
  Description of Artificial Sequence:  siNA antisense region
ccuccaacugccaauacca

SEQ ID NO: 1273 - RNA, 19 nt, Artificial Sequence
  Description of Artificial Sequence:  siNA antisense region
gcucguuggcgcacucuuc

SEQ ID NO: 1274 - RNA, 19 nt, Artificial Sequence
  Description of Artificial Sequence:  siNA antisense region
cugagacagcuuggcuggg

SEQ ID NO: 1275 - RNA, 19 nt, Artificial Sequence
  Description of Artificial Sequence:  siNA antisense region
aaggguauggguuugucac

SEQ ID NO: 1276 - RNA, 19 nt, Artificial Sequence
  Description of Artificial Sequence:  siNA antisense region
cacuucuccauucuucaca

SEQ ID NO: 1277 - RNA, 19 nt, Artificial Sequence
  Description of Artificial Sequence:  siNA antisense region
cucccuggaaguccuccac

SEQ ID NO: 1278 - RNA, 19 nt, Artificial Sequence
  Description of Artificial Sequence:  siNA antisense region
uaacuucaauuuuauuucc

SEQ ID NO: 1279 - RNA, 19 nt, Artificial Sequence
  Description of Artificial Sequence:  siNA antisense region
gagcaaauugauuuuuauu

SEQ ID NO: 1280 - RNA, 19 nt, Artificial Sequence
  Description of Artificial Sequence:  siNA antisense region
uguuuuuuccuucaauuag

SEQ ID NO: 1281 - RNA, 19 nt, Artificial Sequence
  Description of Artificial Sequence:  siNA antisense region
caaggguacuuacaguuuu

SEQ ID NO: 1282 - RNA, 19 nt, Artificial Sequence
  Description of Artificial Sequence:  siNA antisense region
cauuugccgcuuggauaac

SEQ ID NO: 1283 - RNA, 19 nt, Artificial Sequence
  Description of Artificial Sequence:  siNA antisense region
auuuguacaaagcugacac

SEQ ID NO: 1284 - RNA, 19 nt, Artificial Sequence
  Description of Artificial Sequence:  siNA antisense region
cuuuguugaccgcuucaca

SEQ ID NO: 1285 - RNA, 19 nt, Artificial Sequence
  Description of Artificial Sequence:  siNA antisense region
cccucucuccucucccgac

SEQ ID NO: 1286 - RNA, 19 nt, Artificial Sequence
  Description of Artificial Sequence:  siNA antisense region
ucacguggaaggagaucac

SEQ ID NO: 1287 - RNA, 19 nt, Artificial Sequence
  Description of Artificial Sequence:  siNA antisense region
uaauuucaggaccccuggu

SEQ ID NO: 1288 - RNA, 19 nt, Artificial Sequence
  Description of Artificial Sequence:  siNA antisense region
gcaugucagguugcaaagu

SEQ ID NO: 1289 - RNA, 19 nt, Artificial Sequence
  Description of Artificial Sequence:  siNA antisense region
ucuccugcucagugggcug

SEQ ID NO: 1290 - RNA, 19 nt, Artificial Sequence
  Description of Artificial Sequence:  siNA antisense region
ugcaccacaaagacacgcu

SEQ ID NO: 1291 - RNA, 19 nt, Artificial Sequence
  Description of Artificial Sequence:  siNA antisense region
acguagaucugucugcagu

SEQ ID NO: 1292 - RNA, 19 nt, Artificial Sequence
  Description of Artificial Sequence:  siNA antisense region
accaugugagguucucaaa

SEQ ID NO: 1293 - RNA, 19 nt, Artificial Sequence
  Description of Artificial Sequence:  siNA antisense region
gcugugggccaagcuugua

SEQ ID NO: 1294 - RNA, 19 nt, Artificial Sequence
  Description of Artificial Sequence:  siNA antisense region
ccacauggauuggcagagg

SEQ ID NO: 1295 - RNA, 19 nt, Artificial Sequence
  Description of Artificial Sequence:  siNA antisense region
caggugugggcaacucucc

SEQ ID NO: 1296 - RNA, 19 nt, Artificial Sequence
  Description of Artificial Sequence:  siNA antisense region
uauccaaguucuugcaaac

SEQ ID NO: 1297 - RNA, 19 nt, Artificial Sequence
  Description of Artificial Sequence:  siNA antisense region
cauucaauuuccaaagagu

SEQ ID NO: 1298 - RNA, 19 nt, Artificial Sequence
  Description of Artificial Sequence:  siNA antisense region
uauuagagaacaugguggc

SEQ ID NO: 1299 - RNA, 19 nt, Artificial Sequence
  Description of Artificial Sequence:  siNA antisense region
ucaaaaugucauuugugcu

SEQ ID NO: 1300 - RNA, 19 nt, Artificial Sequence
  Description of Artificial Sequence:  siNA antisense region
cauucuuaagcuccaugau

SEQ ID NO: 1301 - RNA, 19 nt, Artificial Sequence
  Description of Artificial Sequence:  siNA antisense region
cuugguccugcaaggaugc

SEQ ID NO: 1302 - RNA, 19 nt, Artificial Sequence
  Description of Artificial Sequence:  siNA antisense region
caaggcagacauagucucc

SEQ ID NO: 1303 - RNA, 19 nt, Artificial Sequence
  Description of Artificial Sequence:  siNA antisense region
uggucuuccugucuugagc

SEQ ID NO: 1304 - RNA, 19 nt, Artificial Sequence
  Description of Artificial Sequence:  siNA antisense region
ccacgcaaugucuuuucuu

SEQ ID NO: 1305 - RNA, 19 nt, Artificial Sequence
  Description of Artificial Sequence:  siNA antisense region
ggacugugagcugccugac

SEQ ID NO: 1306 - RNA, 19 nt, Artificial Sequence
  Description of Artificial Sequence:  siNA antisense region
ugggugccacacgcucuag

SEQ ID NO: 1307 - RNA, 19 nt, Artificial Sequence
  Description of Artificial Sequence:  siNA antisense region
ccagguuuccugugaucgu

SEQ ID NO: 1308 - RNA, 19 nt, Artificial Sequence
  Description of Artificial Sequence:  siNA antisense region
uacuugucgucugauucuc

SEQ ID NO: 1309 - RNA, 19 nt, Artificial Sequence
  Description of Artificial Sequence:  siNA antisense region
cuucgaugcuuuccccaau

SEQ ID NO: 1310 - RNA, 19 nt, Artificial Sequence
  Description of Artificial Sequence:  siNA antisense region
cagaugccgugcaugagac

SEQ ID NO: 1311 - RNA, 19 nt, Artificial Sequence
  Description of Artificial Sequence:  siNA antisense region
ucuguggagggggauuccc

SEQ ID NO: 1312 - RNA, 19 nt, Artificial Sequence
  Description of Artificial Sequence:  siNA antisense region
uaucuuuaaaccacaugau

SEQ ID NO: 1313 - RNA, 19 nt, Artificial Sequence
  Description of Artificial Sequence:  siNA antisense region
cuucuacaagggucucauu

SEQ ID NO: 1314 - RNA, 19 nt, Artificial Sequence
  Description of Artificial Sequence:  siNA antisense region
ucaauacaaugccugaguc

SEQ ID NO: 1315 - RNA, 19 nt, Artificial Sequence
  Description of Artificial Sequence:  siNA antisense region
gguuccgguucccauccuu

SEQ ID NO: 1316 - RNA, 19 nt, Artificial Sequence
  Description of Artificial Sequence:  siNA antisense region
ucacucugcggauagugag

SEQ ID NO: 1317 - RNA, 19 nt, Artificial Sequence
  Description of Artificial Sequence:  siNA antisense region
ggccuucguccuccuuccu

SEQ ID NO: 1318 - RNA, 19 nt, Artificial Sequence
  Description of Artificial Sequence:  siNA antisense region
augccuggcagguguagag

SEQ ID NO: 1319 - RNA, 19 nt, Artificial Sequence
  Description of Artificial Sequence:  siNA antisense region
cacagccaagaacacugca

SEQ ID NO: 1320 - RNA, 19 nt, Artificial Sequence
  Description of Artificial Sequence:  siNA antisense region
aaaaugccuccacuuuugc

SEQ ID NO: 1321 - RNA, 19 nt, Artificial Sequence
  Description of Artificial Sequence:  siNA antisense region
gggcaccuucuauuaugaa

SEQ ID NO: 1322 - RNA, 19 nt, Artificial Sequence
  Description of Artificial Sequence:  siNA antisense region
ccaaguucgucuuuuccug

SEQ ID NO: 1323 - RNA, 19 nt, Artificial Sequence
  Description of Artificial Sequence:  siNA antisense region
cuacuagaauaaugauuuc

SEQ ID NO: 1324 - RNA, 19 nt, Artificial Sequence
  Description of Artificial Sequence:  siNA antisense region
uggcaaucaccgccgugcc

SEQ ID NO: 1325 - RNA, 19 nt, Artificial Sequence
  Description of Artificial Sequence:  siNA antisense region
gaaguagccagaagaacau

SEQ ID NO: 1326 - RNA, 19 nt, Artificial Sequence
  Description of Artificial Sequence:  siNA antisense region
uccguaggaugaugacaag

SEQ ID NO: 1327 - RNA, 19 nt, Artificial Sequence
  Description of Artificial Sequence:  siNA antisense region
cauuggcccgcuuaacggu

SEQ ID NO: 1328 - RNA, 19 nt, Artificial Sequence
  Description of Artificial Sequence:  siNA antisense region
cugucuucaguuccccucc

SEQ ID NO: 1329 - RNA, 19 nt, Artificial Sequence
  Description of Artificial Sequence:  siNA antisense region
ugacgauggacaaguagcc

SEQ ID NO: 1330 - RNA, 19 nt, Artificial Sequence
  Description of Artificial Sequence:  siNA antisense region
ggaguucaucuggauccau

SEQ ID NO: 1331 - RNA, 19 nt, Artificial Sequence
  Description of Artificial Sequence:  siNA antisense region
cacaauguucauccaaugg

SEQ ID NO: 1332 - RNA, 19 nt, Artificial Sequence
  Description of Artificial Sequence:  siNA antisense region
caucauaaggcagucguuc

SEQ ID NO: 1333 - RNA, 19 nt, Artificial Sequence
  Description of Artificial Sequence:  siNA antisense region
ggaauucccauuugcuggc

SEQ ID NO: 1334 - RNA, 19 nt, Artificial Sequence
  Description of Artificial Sequence:  siNA antisense region
gcuucagccggucucuggg

SEQ ID NO: 1335 - RNA, 19 nt, Artificial Sequence
  Description of Artificial Sequence:  siNA antisense region
ggccaagaggcuuaccuag

SEQ ID NO: 1336 - RNA, 19 nt, Artificial Sequence
  Description of Artificial Sequence:  siNA antisense region
cuuggccaaaggcaccacg

SEQ ID NO: 1337 - RNA, 19 nt, Artificial Sequence
  Description of Artificial Sequence:  siNA antisense region
aggcaucugcuucaaucac

SEQ ID NO: 1338 - RNA, 19 nt, Artificial Sequence
  Description of Artificial Sequence:  siNA antisense region
cugucuugucaauuccaaa

SEQ ID NO: 1339 - RNA, 19 nt, Artificial Sequence
  Description of Artificial Sequence:  siNA antisense region
cuacuguccugcaaguugc

SEQ ID NO: 1340 - RNA, 19 nt, Artificial Sequence
  Description of Artificial Sequence:  siNA antisense region
cuuucaacauuuugacugc

SEQ ID NO: 1341 - RNA, 19 nt, Artificial Sequence
  Description of Artificial Sequence:  siNA antisense region
cacuguguguugcuccuuc

SEQ ID NO: 1342 - RNA, 19 nt, Artificial Sequence
  Description of Artificial Sequence:  siNA antisense region
acaugagagcucgaugcuc

SEQ ID NO: 1343 - RNA, 19 nt, Artificial Sequence
  Description of Artificial Sequence:  siNA antisense region
ugaggaucuugaguucaga

SEQ ID NO: 1344 - RNA, 19 nt, Artificial Sequence
  Description of Artificial Sequence:  siNA antisense region
gauggugaccaauaugaau

SEQ ID NO: 1345 - RNA, 19 nt, Artificial Sequence
  Description of Artificial Sequence:  siNA antisense region
gaagguugaccacauugag

SEQ ID NO: 1346 - RNA, 19 nt, Artificial Sequence
  Description of Artificial Sequence:  siNA antisense region
gcuugguacaggcaccuag

SEQ ID NO: 1347 - RNA, 19 nt, Artificial Sequence
  Description of Artificial Sequence:  siNA antisense region
ccaugaguggcccuccugg

SEQ ID NO: 1348 - RNA, 19 nt, Artificial Sequence
  Description of Artificial Sequence:  siNA antisense region
ugcagaauuccacaaucac

SEQ ID NO: 1349 - RNA, 19 nt, Artificial Sequence
  Description of Artificial Sequence:  siNA antisense region
uggacagguuuccaaauuu

SEQ ID NO: 1350 - RNA, 19 nt, Artificial Sequence
  Description of Artificial Sequence:  siNA antisense region
ucuugcuccucagguaagu

SEQ ID NO: 1351 - RNA, 19 nt, Artificial Sequence
  Description of Artificial Sequence:  siNA antisense region
aggggacaaauucauuucu

SEQ ID NO: 1352 - RNA, 19 nt, Artificial Sequence
  Description of Artificial Sequence:  siNA antisense region
gugccccuuuggucuugua

SEQ ID NO: 1353 - RNA, 19 nt, Artificial Sequence
  Description of Artificial Sequence:  siNA antisense region
cuuucccuugacggaaucg

SEQ ID NO: 1354 - RNA, 19 nt, Artificial Sequence
  Description of Artificial Sequence:  siNA antisense region
ggauugcuccaacguaguc

SEQ ID NO: 1355 - RNA, 19 nt, Artificial Sequence
  Description of Artificial Sequence:  siNA antisense region
gccguuucagauccacagg

SEQ ID NO: 1356 - RNA, 19 nt, Artificial Sequence
  Description of Artificial Sequence:  siNA antisense region
uggugaugcuguccaagcg

SEQ ID NO: 1357 - RNA, 19 nt, Artificial Sequence
  Description of Artificial Sequence:  siNA antisense region
uggcugagcucuggcuacu

SEQ ID NO: 1358 - RNA, 19 nt, Artificial Sequence
  Description of Artificial Sequence:  siNA antisense region
ccuccacaaauccagagcu

SEQ ID NO: 1359 - RNA, 19 nt, Artificial Sequence
  Description of Artificial Sequence:  siNA antisense region
caucacugagggacuucuc

SEQ ID NO: 1360 - RNA, 19 nt, Artificial Sequence
  Description of Artificial Sequence:  siNA antisense region
gagcuuccucuucuucuac

SEQ ID NO: 1361 - RNA, 19 nt, Artificial Sequence
  Description of Artificial Sequence:  siNA antisense region
ccuuauacagaucuucagg

SEQ ID NO: 1362 - RNA, 19 nt, Artificial Sequence
  Description of Artificial Sequence:  siNA antisense region
gcuccaaggucaggaaguc

SEQ ID NO: 1363 - RNA, 19 nt, Artificial Sequence
  Description of Artificial Sequence:  siNA antisense region
agcuguaacagaugagaug

SEQ ID NO: 1364 - RNA, 19 nt, Artificial Sequence
  Description of Artificial Sequence:  siNA antisense region
ugcccuuagccacuuggaa

SEQ ID NO: 1365 - RNA, 19 nt, Artificial Sequence
  Description of Artificial Sequence:  siNA antisense region
gcgaugccaagaacuccau

SEQ ID NO: 1366 - RNA, 19 nt, Artificial Sequence
  Description of Artificial Sequence:  siNA antisense region
cccuguggauacacuuucg

SEQ ID NO: 1367 - RNA, 19 nt, Artificial Sequence
  Description of Artificial Sequence:  siNA antisense region
uauuucgugccgccagguc

SEQ ID NO: 1368 - RNA, 19 nt, Artificial Sequence
  Description of Artificial Sequence:  siNA antisense region
ucuucuccgauaagaggau

SEQ ID NO: 1369 - RNA, 19 nt, Artificial Sequence
  Description of Artificial Sequence:  siNA antisense region
cacagauuuuaaccacguu

SEQ ID NO: 1370 - RNA, 19 nt, Artificial Sequence
  Description of Artificial Sequence:  siNA antisense region
cccgggccaagccaaaguc

SEQ ID NO: 1371 - RNA, 19 nt, Artificial Sequence
  Description of Artificial Sequence:  siNA antisense region
cuggaucuuuauaaauauc

SEQ ID NO: 1372 - RNA, 19 nt, Artificial Sequence
  Description of Artificial Sequence:  siNA antisense region
cuccuuuucugacauaauc

SEQ ID NO: 1373 - RNA, 19 nt, Artificial Sequence
  Description of Artificial Sequence:  siNA antisense region
ucaaagggaggcgagcauc

SEQ ID NO: 1374 - RNA, 19 nt, Artificial Sequence
  Description of Artificial Sequence:  siNA antisense region
uuucuggggccauccauuu

SEQ ID NO: 1375 - RNA, 19 nt, Artificial Sequence
  Description of Artificial Sequence:  siNA antisense region
acacucugucaaaaauugu

SEQ ID NO: 1376 - RNA, 19 nt, Artificial Sequence
  Description of Artificial Sequence:  siNA antisense region
cgucacucuggauugugua

SEQ ID NO: 1377 - RNA, 19 nt, Artificial Sequence
  Description of Artificial Sequence:  siNA antisense region
aaacaccaaaagaccagac

SEQ ID NO: 1378 - RNA, 19 nt, Artificial Sequence
  Description of Artificial Sequence:  siNA antisense region
aaaauauuucccacagcaa

SEQ ID NO: 1379 - RNA, 19 nt, Artificial Sequence
  Description of Artificial Sequence:  siNA antisense region
auggagaagcaccuaagga

SEQ ID NO: 1380 - RNA, 19 nt, Artificial Sequence
  Description of Artificial Sequence:  siNA antisense region
caaucuuuaccccaggaua

SEQ ID NO: 1381 - RNA, 19 nt, Artificial Sequence
  Description of Artificial Sequence:  siNA antisense region
gccuacaaaauucuucauc

SEQ ID NO: 1382 - RNA, 19 nt, Artificial Sequence
  Description of Artificial Sequence:  siNA antisense region
uaguuccuucuuucaaucg

SEQ ID NO: 1383 - RNA, 19 nt, Artificial Sequence
  Description of Artificial Sequence:  siNA antisense region
aaucaggggcccucauucu

SEQ ID NO: 1384 - RNA, 19 nt, Artificial Sequence
  Description of Artificial Sequence:  siNA antisense region
acauuucugguguaguaua

SEQ ID NO: 1385 - RNA, 19 nt, Artificial Sequence
  Description of Artificial Sequence:  siNA antisense region
aguccagcauggucuggua

SEQ ID NO: 1386 - RNA, 19 nt, Artificial Sequence
  Description of Artificial Sequence:  siNA antisense region
ugggcuccccgugccagca

SEQ ID NO: 1387 - RNA, 19 nt, Artificial Sequence
  Description of Artificial Sequence:  siNA antisense region
aaaacgugggucucugacu

SEQ ID NO: 1388 - RNA, 19 nt, Artificial Sequence
  Description of Artificial Sequence:  siNA antisense region
aauguuccaccaacucuga

SEQ ID NO: 1389 - RNA, 19 nt, Artificial Sequence
  Description of Artificial Sequence:  siNA antisense region
cuugcaagagauuucccaa

SEQ ID NO: 1390 - RNA, 19 nt, Artificial Sequence
  Description of Artificial Sequence:  siNA antisense region
cauccugcugagcauuagc

SEQ ID NO: 1391 - RNA, 19 nt, Artificial Sequence
  Description of Artificial Sequence:  siNA antisense region
gaacaauguagucuuugcc

SEQ ID NO: 1392 - RNA, 19 nt, Artificial Sequence
  Description of Artificial Sequence:  siNA antisense region
aagucucugauaucggaag

SEQ ID NO: 1393 - RNA, 19 nt, Artificial Sequence
  Description of Artificial Sequence:  siNA antisense region
aauccucuuccaugcucaa

SEQ ID NO: 1394 - RNA, 19 nt, Artificial Sequence
  Description of Artificial Sequence:  siNA antisense region
uaggcagagagaguccaga

SEQ ID NO: 1395 - RNA, 19 nt, Artificial Sequence
  Description of Artificial Sequence:  siNA antisense region
uacaggaaacaggugaggu

SEQ ID NO: 1396 - RNA, 19 nt, Artificial Sequence
  Description of Artificial Sequence:  siNA antisense region
auacuuccuccuccuccau

SEQ ID NO: 1397 - RNA, 19 nt, Artificial Sequence
  Description of Artificial Sequence:  siNA antisense region
aauggaauuuggggucaca

SEQ ID NO: 1398 - RNA, 19 nt, Artificial Sequence
  Description of Artificial Sequence:  siNA antisense region
uuccugcuguguugucaua

SEQ ID NO: 1399 - RNA, 19 nt, Artificial Sequence
  Description of Artificial Sequence:  siNA antisense region
ucugcagauacugacugau

SEQ ID NO: 1400 - RNA, 19 nt, Artificial Sequence
  Description of Artificial Sequence:  siNA antisense region
ggcucuuucgcuuacuguu

SEQ ID NO: 1401 - RNA, 19 nt, Artificial Sequence
  Description of Artificial Sequence:  siNA antisense region
uuuuuacacucacaggccg

SEQ ID NO: 1402 - RNA, 19 nt, Artificial Sequence
  Description of Artificial Sequence:  siNA antisense region
acgggauaucuucaaaugu

SEQ ID NO: 1403 - RNA, 19 nt, Artificial Sequence
  Description of Artificial Sequence:  siNA antisense region
uuacuucugguucuucuaa

SEQ ID NO: 1404 - RNA, 19 nt, Artificial Sequence
  Description of Artificial Sequence:  siNA antisense region
ugucaucugggauuacuuu

SEQ ID NO: 1405 - RNA, 19 nt, Artificial Sequence
  Description of Artificial Sequence:  siNA antisense region
uaccacuguccgucugguu

SEQ ID NO: 1406 - RNA, 19 nt, Artificial Sequence
  Description of Artificial Sequence:  siNA antisense region
cuucugaggcaagaaccau

SEQ ID NO: 1407 - RNA, 19 nt, Artificial Sequence
  Description of Artificial Sequence:  siNA antisense region
cuuccaaaguuuucagcuc

SEQ ID NO: 1408 - RNA, 19 nt, Artificial Sequence
  Description of Artificial Sequence:  siNA antisense region
gagauaauuugguucuguc

SEQ ID NO: 1409 - RNA, 19 nt, Artificial Sequence
  Description of Artificial Sequence:  siNA antisense region
ccauuccaccaaaagaugg

SEQ ID NO: 1410 - RNA, 19 nt, Artificial Sequence
  Description of Artificial Sequence:  siNA antisense region
cccugcuuuugcugggcac

SEQ ID NO: 1411 - RNA, 19 nt, Artificial Sequence
  Description of Artificial Sequence:  siNA antisense region
cuucagaugccacagacuc

SEQ ID NO: 1412 - RNA, 19 nt, Artificial Sequence
  Description of Artificial Sequence:  siNA antisense region
cgcuugucugguuugagcc

SEQ ID NO: 1413 - RNA, 19 nt, Artificial Sequence
  Description of Artificial Sequence:  siNA antisense region
gauauccggacugguagcc

SEQ ID NO: 1414 - RNA, 19 nt, Artificial Sequence
  Description of Artificial Sequence:  siNA antisense region
ugucugugucaucggagug

SEQ ID NO: 1415 - RNA, 19 nt, Artificial Sequence
  Description of Artificial Sequence:  siNA antisense region
cacuggaguacacgguggu

SEQ ID NO: 1416 - RNA, 19 nt, Artificial Sequence
  Description of Artificial Sequence:  siNA antisense region
uuaaaaguucugcuuccuc

SEQ ID NO: 1417 - RNA, 19 nt, Artificial Sequence
  Description of Artificial Sequence:  siNA antisense region
cuccaaucucuaucagcuu

SEQ ID NO: 1418 - RNA, 19 nt, Artificial Sequence
  Description of Artificial Sequence:  siNA antisense region
cugugcuaccgguuugcac

SEQ ID NO: 1419 - RNA, 19 nt, Artificial Sequence
  Description of Artificial Sequence:  siNA antisense region
caggcuggagaaucugggc

SEQ ID NO: 1420 - RNA, 19 nt, Artificial Sequence
  Description of Artificial Sequence:  siNA antisense region
ucagugugguccccgaguc

SEQ ID NO: 1421 - RNA, 19 nt, Artificial Sequence
  Description of Artificial Sequence:  siNA antisense region
uuuaaacaggaggagagcu

SEQ ID NO: 1422 - RNA, 19 nt, Artificial Sequence
  Description of Artificial Sequence:  siNA antisense region
gggguguggaugcuuccuu

SEQ ID NO: 1423 - RNA, 19 nt, Artificial Sequence
  Description of Artificial Sequence:  siNA antisense region
augugauguccgggaguug

SEQ ID NO: 1424 - RNA, 19 nt, Artificial Sequence
  Description of Artificial Sequence:  siNA antisense region
aaucugagcagaccucuca

SEQ ID NO: 1425 - RNA, 19 nt, Artificial Sequence
  Description of Artificial Sequence:  siNA antisense region
gaaagaacaacacuucaaa

SEQ ID NO: 1426 - RNA, 19 nt, Artificial Sequence
  Description of Artificial Sequence:  siNA antisense region
ggcuacuuccugcuggugg

SEQ ID NO: 1427 - RNA, 19 nt, Artificial Sequence
  Description of Artificial Sequence:  siNA antisense region
gaaaugaaaaucaaaugcg

SEQ ID NO: 1428 - RNA, 19 nt, Artificial Sequence
  Description of Artificial Sequence:  siNA antisense region
gguccuuuuucuguugucg

SEQ ID NO: 1429 - RNA, 19 nt, Artificial Sequence
  Description of Artificial Sequence:  siNA antisense region
uggcucccugcaguccgag

SEQ ID NO: 1430 - RNA, 19 nt, Artificial Sequence
  Description of Artificial Sequence:  siNA antisense region
aggauaugccuagaagacu

SEQ ID NO: 1431 - RNA, 19 nt, Artificial Sequence
  Description of Artificial Sequence:  siNA antisense region
gggucacaagccucuucca

SEQ ID NO: 1432 - RNA, 19 nt, Artificial Sequence
  Description of Artificial Sequence:  siNA antisense region
agacacagacacauucuug

SEQ ID NO: 1433 - RNA, 19 nt, Artificial Sequence
  Description of Artificial Sequence:  siNA antisense region
caggucaacacugggagaa

SEQ ID NO: 1434 - RNA, 19 nt, Artificial Sequence
  Description of Artificial Sequence:  siNA antisense region
ugaaugaaaaaagaggauc

SEQ ID NO: 1435 - RNA, 19 nt, Artificial Sequence
  Description of Artificial Sequence:  siNA antisense region
augauaaugcuuuuuaaau

SEQ ID NO: 1436 - RNA, 19 nt, Artificial Sequence
  Description of Artificial Sequence:  siNA antisense region
gagacccgcagcaggggca

SEQ ID NO: 1437 - RNA, 19 nt, Artificial Sequence
  Description of Artificial Sequence:  siNA antisense region
uuguucuaaacccauggug

SEQ ID NO: 1438 - RNA, 19 nt, Artificial Sequence
  Description of Artificial Sequence:  siNA antisense region
gccauugcuugaagcucuu

SEQ ID NO: 1439 - RNA, 19 nt, Artificial Sequence
  Description of Artificial Sequence:  siNA antisense region
uacuucuuugaggaugggg

SEQ ID NO: 1440 - RNA, 19 nt, Artificial Sequence
  Description of Artificial Sequence:  siNA antisense region
cagcuccccagguacugcu

SEQ ID NO: 1441 - RNA, 19 nt, Artificial Sequence
  Description of Artificial Sequence:  siNA antisense region
cuaguuuuacagaaguguc

SEQ ID NO: 1442 - RNA, 19 nt, Artificial Sequence
  Description of Artificial Sequence:  siNA antisense region
cguugccugguuuaucuuc

SEQ ID NO: 1443 - RNA, 19 nt, Artificial Sequence
  Description of Artificial Sequence:  siNA antisense region
caacaccucgaacacuuac

SEQ ID NO: 1444 - RNA, 19 nt, Artificial Sequence
  Description of Artificial Sequence:  siNA antisense region
gcaaauccuucccaucuuc

SEQ ID NO: 1445 - RNA, 19 nt, Artificial Sequence
  Description of Artificial Sequence:  siNA antisense region
uuggauagacucagcccug

SEQ ID NO: 1446 - RNA, 19 nt, Artificial Sequence
  Description of Artificial Sequence:  siNA antisense region
cguccuaaacaaagccucu

SEQ ID NO: 1447 - RNA, 19 nt, Artificial Sequence
  Description of Artificial Sequence:  siNA antisense region
ggcuuggcuugggacccac

SEQ ID NO: 1448 - RNA, 19 nt, Artificial Sequence
  Description of Artificial Sequence:  siNA antisense region
uccgaauuccacacuuaag

SEQ ID NO: 1449 - RNA, 19 nt, Artificial Sequence
  Description of Artificial Sequence:  siNA antisense region
agucuuccuuucuaucaau

SEQ ID NO: 1450 - RNA, 19 nt, Artificial Sequence
  Description of Artificial Sequence:  siNA antisense region
ccaaagcaagguaacguua

SEQ ID NO: 1451 - RNA, 19 nt, Artificial Sequence
  Description of Artificial Sequence:  siNA antisense region
ugcaggcuccaguacucuc

SEQ ID NO: 1452 - RNA, 19 nt, Artificial Sequence
  Description of Artificial Sequence:  siNA antisense region
gagcaaacacaaugcauuu

SEQ ID NO: 1453 - RNA, 19 nt, Artificial Sequence
  Description of Artificial Sequence:  siNA antisense region
ccaugcccaccuccaccag

SEQ ID NO: 1454 - RNA, 19 nt, Artificial Sequence
  Description of Artificial Sequence:  siNA antisense region
uacauuucagaacagaccc

SEQ ID NO: 1455 - RNA, 19 nt, Artificial Sequence
  Description of Artificial Sequence:  siNA antisense region
aaccccgucugaacccuuu

SEQ ID NO: 1456 - RNA, 19 nt, Artificial Sequence
  Description of Artificial Sequence:  siNA antisense region
caaccuucuaaaaccagaa

SEQ ID NO: 1457 - RNA, 19 nt, Artificial Sequence
  Description of Artificial Sequence:  siNA antisense region
cccaacucgaagaacacgc

SEQ ID NO: 1458 - RNA, 19 nt, Artificial Sequence
  Description of Artificial Sequence:  siNA antisense region
caacgaacucuacuuuagc

SEQ ID NO: 1459 - RNA, 19 nt, Artificial Sequence
  Description of Artificial Sequence:  siNA antisense region
uaggagucagaaacagcac

SEQ ID NO: 1460 - RNA, 19 nt, Artificial Sequence
  Description of Artificial Sequence:  siNA antisense region
ucuggaaggaacucucauu

SEQ ID NO: 1461 - RNA, 19 nt, Artificial Sequence
  Description of Artificial Sequence:  siNA antisense region
caaggagacagcuaacggu

SEQ ID NO: 1462 - RNA, 19 nt, Artificial Sequence
  Description of Artificial Sequence:  siNA antisense region
uuucuuccuggggcuuggc

SEQ ID NO: 1463 - RNA, 19 nt, Artificial Sequence
  Description of Artificial Sequence:  siNA antisense region
gagccagagcugcaucauu

SEQ ID NO: 1464 - RNA, 19 nt, Artificial Sequence
  Description of Artificial Sequence:  siNA antisense region
aucagccugggagacaagg

SEQ ID NO: 1465 - RNA, 19 nt, Artificial Sequence
  Description of Artificial Sequence:  siNA antisense region
ugguauucugaauaaagga

SEQ ID NO: 1466 - RNA, 19 nt, Artificial Sequence
  Description of Artificial Sequence:  siNA antisense region
cugaauguccuuucuuugu

SEQ ID NO: 1467 - RNA, 19 nt, Artificial Sequence
  Description of Artificial Sequence:  siNA antisense region
acggcagggagccuugagc

SEQ ID NO: 1468 - RNA, 19 nt, Artificial Sequence
  Description of Artificial Sequence:  siNA antisense region
cagucagaacucuucaaca

SEQ ID NO: 1469 - RNA, 19 nt, Artificial Sequence
  Description of Artificial Sequence:  siNA antisense region
accagaagcugguuugugc

SEQ ID NO: 1470 - RNA, 19 nt, Artificial Sequence
  Description of Artificial Sequence:  siNA antisense region
guauucauuccagaagaaa

SEQ ID NO: 1471 - RNA, 19 nt, Artificial Sequence
  Description of Artificial Sequence:  siNA antisense region
aucaggacagauaugaggg

SEQ ID NO: 1472 - RNA, 19 nt, Artificial Sequence
  Description of Artificial Sequence:  siNA antisense region
cagucucagacauaucaca

SEQ ID NO: 1473 - RNA, 19 nt, Artificial Sequence
  Description of Artificial Sequence:  siNA antisense region
cauugaaccucccgcauuc

SEQ ID NO: 1474 - RNA, 19 nt, Artificial Sequence
  Description of Artificial Sequence:  siNA antisense region
acaccacacacagcuucac

SEQ ID NO: 1475 - RNA, 19 nt, Artificial Sequence
  Description of Artificial Sequence:  siNA antisense region
auccuuccugaaacuuuga

SEQ ID NO: 1476 - RNA, 19 nt, Artificial Sequence
  Description of Artificial Sequence:  siNA antisense region
gaagaacaaaaggguaaaa

SEQ ID NO: 1477 - RNA, 19 nt, Artificial Sequence
  Description of Artificial Sequence:  siNA antisense region
guggguuggggacaggggg

SEQ ID NO: 1478 - RNA, 19 nt, Artificial Sequence
  Description of Artificial Sequence:  siNA antisense region
auggguugcggggugagag

SEQ ID NO: 1479 - RNA, 19 nt, Artificial Sequence
  Description of Artificial Sequence:  siNA antisense region
caaauaacuaaaauacuga

SEQ ID NO: 1480 - RNA, 19 nt, Artificial Sequence
  Description of Artificial Sequence:  siNA antisense region
guuuacuggaguagaggcc

SEQ ID NO: 1481 - RNA, 19 nt, Artificial Sequence
  Description of Artificial Sequence:  siNA antisense region
gugaacaaacccaaucagg

SEQ ID NO: 1482 - RNA, 19 nt, Artificial Sequence
  Description of Artificial Sequence:  siNA antisense region
cuaauaaucauucagagag

SEQ ID NO: 1483 - RNA, 19 nt, Artificial Sequence
  Description of Artificial Sequence:  siNA antisense region
aauaauuuugaagucuggc

SEQ ID NO: 1484 - RNA, 19 nt, Artificial Sequence
  Description of Artificial Sequence:  siNA antisense region
uuauaauuugggcuauaaa

SEQ ID NO: 1485 - RNA, 19 nt, Artificial Sequence
  Description of Artificial Sequence:  siNA antisense region
uaaauaauacaauagaugu

SEQ ID NO: 1486 - RNA, 19 nt, Artificial Sequence
  Description of Artificial Sequence:  siNA antisense region
cucuauauguuaaaagucu

SEQ ID NO: 1487 - RNA, 19 nt, Artificial Sequence
  Description of Artificial Sequence:  siNA antisense region
aaaaaucaguagaaauagc

SEQ ID NO: 1488 - RNA, 19 nt, Artificial Sequence
  Description of Artificial Sequence:  siNA antisense region
aaaggacagaacaagggca

SEQ ID NO: 1489 - RNA, 19 nt, Artificial Sequence
  Description of Artificial Sequence:  siNA antisense region
cauuuucuuuuuugaaaaa

SEQ ID NO: 1490 - RNA, 19 nt, Artificial Sequence
  Description of Artificial Sequence:  siNA antisense region
gguaccaaacaaaaaacac

SEQ ID NO: 1491 - RNA, 19 nt, Artificial Sequence
  Description of Artificial Sequence:  siNA antisense region
cccagcauuucacacuaug

SEQ ID NO: 1492 - RNA, 19 nt, Artificial Sequence
  Description of Artificial Sequence:  siNA antisense region
ugucuuauagucauuguuc

SEQ ID NO: 1493 - RNA, 19 nt, Artificial Sequence
  Description of Artificial Sequence:  siNA antisense region
aauauaugugccauagcau

SEQ ID NO: 1494 - RNA, 19 nt, Artificial Sequence
  Description of Artificial Sequence:  siNA antisense region
cuacauaaacagacuauaa

SEQ ID NO: 1495 - RNA, 19 nt, Artificial Sequence
  Description of Artificial Sequence:  siNA antisense region
aauauauuacauuuguuuc

SEQ ID NO: 1496 - RNA, 19 nt, Artificial Sequence
  Description of Artificial Sequence:  siNA antisense region
cauuauauauaaggcuuua

SEQ ID NO: 1497 - RNA, 19 nt, Artificial Sequence
  Description of Artificial Sequence:  siNA antisense region
ugugaauaguacaaaguuc

SEQ ID NO: 1498 - RNA, 19 nt, Artificial Sequence
  Description of Artificial Sequence:  siNA antisense region
cauaauacugauacaaaau

SEQ ID NO: 1499 - RNA, 19 nt, Artificial Sequence
  Description of Artificial Sequence:  siNA antisense region
augaccuuuguuaugcuac

SEQ ID NO: 1500 - RNA, 19 nt, Artificial Sequence
  Description of Artificial Sequence:  siNA antisense region
ucaauugcugaaagcauua

SEQ ID NO: 1501 - RNA, 19 nt, Artificial Sequence
  Description of Artificial Sequence:  siNA antisense region
uucuuuaauaaaaugacau

SEQ ID NO: 1502 - RNA, 19 nt, Artificial Sequence
  Description of Artificial Sequence:  siNA antisense region
ucaaguuuuucaauguucu

SEQ ID NO: 1503 - RNA, 19 nt, Artificial Sequence
  Description of Artificial Sequence:  Target Sequence/siNA sense region
acccacgcgcagcggccgg

SEQ ID NO: 1504 - RNA, 19 nt, Artificial Sequence
  Description of Artificial Sequence:  Target Sequence/siNA sense region
gagaugcagcggggcgccg

SEQ ID NO: 1505 - RNA, 19 nt, Artificial Sequence
  Description of Artificial Sequence:  Target Sequence/siNA sense region
gcgcugugccugcgacugu

SEQ ID NO: 1506 - RNA, 19 nt, Artificial Sequence
  Description of Artificial Sequence:  Target Sequence/siNA sense region
uggcucugccugggacucc

SEQ ID NO: 1507 - RNA, 19 nt, Artificial Sequence
  Description of Artificial Sequence:  Target Sequence/siNA sense region
cuggacggccuggugagug

SEQ ID NO: 1508 - RNA, 19 nt, Artificial Sequence
  Description of Artificial Sequence:  Target Sequence/siNA sense region
gacuacuccaugacccccc

SEQ ID NO: 1509 - RNA, 19 nt, Artificial Sequence
  Description of Artificial Sequence:  Target Sequence/siNA sense region
ccgaccuugaacaucacgg

SEQ ID NO: 1510 - RNA, 19 nt, Artificial Sequence
  Description of Artificial Sequence:  Target Sequence/siNA sense region
gaggagucacacgucaucg

SEQ ID NO: 1511 - RNA, 19 nt, Artificial Sequence
  Description of Artificial Sequence:  Target Sequence/siNA sense region
gacaccggugacagccugu

SEQ ID NO: 1512 - RNA, 19 nt, Artificial Sequence
  Description of Artificial Sequence:  Target Sequence/siNA sense region
uccaucuccugcaggggac

SEQ ID NO: 1513 - RNA, 19 nt, Artificial Sequence
  Description of Artificial Sequence:  Target Sequence/siNA sense region
cagcacccccucgaguggg

SEQ ID NO: 1514 - RNA, 19 nt, Artificial Sequence
  Description of Artificial Sequence:  Target Sequence/siNA sense region
gcuuggccaggagcucagg

SEQ ID NO: 1515 - RNA, 19 nt, Artificial Sequence
  Description of Artificial Sequence:  Target Sequence/siNA sense region
gaggcgccagccaccggag

SEQ ID NO: 1516 - RNA, 19 nt, Artificial Sequence
  Description of Artificial Sequence:  Target Sequence/siNA sense region
gacaaggacagcgaggaca

SEQ ID NO: 1517 - RNA, 19 nt, Artificial Sequence
  Description of Artificial Sequence:  Target Sequence/siNA sense region
acggggguggugcgagacu

SEQ ID NO: 1518 - RNA, 19 nt, Artificial Sequence
  Description of Artificial Sequence:  Target Sequence/siNA sense region
ugcgagggcacagacgcca

SEQ ID NO: 1519 - RNA, 19 nt, Artificial Sequence
  Description of Artificial Sequence:  Target Sequence/siNA sense region
aggcccuacugcaaggugu

SEQ ID NO: 1520 - RNA, 19 nt, Artificial Sequence
  Description of Artificial Sequence:  Target Sequence/siNA sense region
uugcugcugcacgagguac

SEQ ID NO: 1521 - RNA, 19 nt, Artificial Sequence
  Description of Artificial Sequence:  Target Sequence/siNA sense region
caugccaacgacacaggca

SEQ ID NO: 1522 - RNA, 19 nt, Artificial Sequence
  Description of Artificial Sequence:  Target Sequence/siNA sense region
agcuacgucugcuacuaca

SEQ ID NO: 1523 - RNA, 19 nt, Artificial Sequence
  Description of Artificial Sequence:  Target Sequence/siNA sense region
aaguacaucaaggcacgca

SEQ ID NO: 1524 - RNA, 19 nt, Artificial Sequence
  Description of Artificial Sequence:  Target Sequence/siNA sense region
aucgagggcaccacggccg

SEQ ID NO: 1525 - RNA, 19 nt, Artificial Sequence
  Description of Artificial Sequence:  Target Sequence/siNA sense region
gccagcuccuacguguucg

SEQ ID NO: 1526 - RNA, 19 nt, Artificial Sequence
  Description of Artificial Sequence:  Target Sequence/siNA sense region
gugagagacuuugagcagc

SEQ ID NO: 1527 - RNA, 19 nt, Artificial Sequence
  Description of Artificial Sequence:  Target Sequence/siNA sense region
ccauucaucaacaagccug

SEQ ID NO: 1528 - RNA, 19 nt, Artificial Sequence
  Description of Artificial Sequence:  Target Sequence/siNA sense region
gacacgcucuuggucaaca

SEQ ID NO: 1529 - RNA, 19 nt, Artificial Sequence
  Description of Artificial Sequence:  Target Sequence/siNA sense region
aggaaggacgccauguggg

SEQ ID NO: 1530 - RNA, 19 nt, Artificial Sequence
  Description of Artificial Sequence:  Target Sequence/siNA sense region
gugcccugucuggugucca

SEQ ID NO: 1531 - RNA, 19 nt, Artificial Sequence
  Description of Artificial Sequence:  Target Sequence/siNA sense region
auccccggccucaauguca

SEQ ID NO: 1532 - RNA, 19 nt, Artificial Sequence
  Description of Artificial Sequence:  Target Sequence/siNA sense region
acgcugcgcucgcaaagcu

SEQ ID NO: 1533 - RNA, 19 nt, Artificial Sequence
  Description of Artificial Sequence:  Target Sequence/siNA sense region
ucggugcuguggccagacg

SEQ ID NO: 1534 - RNA, 19 nt, Artificial Sequence
  Description of Artificial Sequence:  Target Sequence/siNA sense region
gggcaggaggugguguggg

SEQ ID NO: 1535 - RNA, 19 nt, Artificial Sequence
  Description of Artificial Sequence:  Target Sequence/siNA sense region
gaugaccggcggggcaugc

SEQ ID NO: 1536 - RNA, 19 nt, Artificial Sequence
  Description of Artificial Sequence:  Target Sequence/siNA sense region
cucguguccacgccacugc

SEQ ID NO: 1537 - RNA, 19 nt, Artificial Sequence
  Description of Artificial Sequence:  Target Sequence/siNA sense region
cugcacgaugcccuguacc

SEQ ID NO: 1538 - RNA, 19 nt, Artificial Sequence
  Description of Artificial Sequence:  Target Sequence/siNA sense region
cugcagugcgagaccaccu

SEQ ID NO: 1539 - RNA, 19 nt, Artificial Sequence
  Description of Artificial Sequence:  Target Sequence/siNA sense region
uggggagaccaggacuucc

SEQ ID NO: 1540 - RNA, 19 nt, Artificial Sequence
  Description of Artificial Sequence:  Target Sequence/siNA sense region
cuuuccaaccccuuccugg

SEQ ID NO: 1541 - RNA, 19 nt, Artificial Sequence
  Description of Artificial Sequence:  Target Sequence/siNA sense region
gugcacaucacaggcaacg

SEQ ID NO: 1542 - RNA, 19 nt, Artificial Sequence
  Description of Artificial Sequence:  Target Sequence/siNA sense region
gagcucuaugacauccagc

SEQ ID NO: 1543 - RNA, 19 nt, Artificial Sequence
  Description of Artificial Sequence:  Target Sequence/siNA sense region
cuguugcccaggaagucgc

SEQ ID NO: 1544 - RNA, 19 nt, Artificial Sequence
  Description of Artificial Sequence:  Target Sequence/siNA sense region
cuggagcugcugguagggg

SEQ ID NO: 1545 - RNA, 19 nt, Artificial Sequence
  Description of Artificial Sequence:  Target Sequence/siNA sense region
gagaagcugguccucaacu

SEQ ID NO: 1546 - RNA, 19 nt, Artificial Sequence
  Description of Artificial Sequence:  Target Sequence/siNA sense region
ugcaccgugugggcugagu

SEQ ID NO: 1547 - RNA, 19 nt, Artificial Sequence
  Description of Artificial Sequence:  Target Sequence/siNA sense region
uuuaacucaggugucaccu

SEQ ID NO: 1548 - RNA, 19 nt, Artificial Sequence
  Description of Artificial Sequence:  Target Sequence/siNA sense region
uuugacugggacuacccag

SEQ ID NO: 1549 - RNA, 19 nt, Artificial Sequence
  Description of Artificial Sequence:  Target Sequence/siNA sense region
gggaagcaggcagagcggg

SEQ ID NO: 1550 - RNA, 19 nt, Artificial Sequence
  Description of Artificial Sequence:  Target Sequence/siNA sense region
gguaagugggugcccgagc

SEQ ID NO: 1551 - RNA, 19 nt, Artificial Sequence
  Description of Artificial Sequence:  Target Sequence/siNA sense region
cgacgcucccaacagaccc

SEQ ID NO: 1552 - RNA, 19 nt, Artificial Sequence
  Description of Artificial Sequence:  Target Sequence/siNA sense region
cacacagaacucuccagca

SEQ ID NO: 1553 - RNA, 19 nt, Artificial Sequence
  Description of Artificial Sequence:  Target Sequence/siNA sense region
auccugaccauccacaacg

SEQ ID NO: 1554 - RNA, 19 nt, Artificial Sequence
  Description of Artificial Sequence:  Target Sequence/siNA sense region
gucagccagcacgaccugg

SEQ ID NO: 1555 - RNA, 19 nt, Artificial Sequence
  Description of Artificial Sequence:  Target Sequence/siNA sense region
ggcucguaugugugcaagg

SEQ ID NO: 1556 - RNA, 19 nt, Artificial Sequence
  Description of Artificial Sequence:  Target Sequence/siNA sense region
gccaacaacggcauccagc

SEQ ID NO: 1557 - RNA, 19 nt, Artificial Sequence
  Description of Artificial Sequence:  Target Sequence/siNA sense region
cgauuucgggagagcaccg

SEQ ID NO: 1558 - RNA, 19 nt, Artificial Sequence
  Description of Artificial Sequence:  Target Sequence/siNA sense region
gaggucauugugcaugaaa

SEQ ID NO: 1559 - RNA, 19 nt, Artificial Sequence
  Description of Artificial Sequence:  Target Sequence/siNA sense region
aaucccuucaucagcgucg

SEQ ID NO: 1560 - RNA, 19 nt, Artificial Sequence
  Description of Artificial Sequence:  Target Sequence/siNA sense region
gaguggcucaaaggaccca

SEQ ID NO: 1561 - RNA, 19 nt, Artificial Sequence
  Description of Artificial Sequence:  Target Sequence/siNA sense region
auccuggaggccacggcag

SEQ ID NO: 1562 - RNA, 19 nt, Artificial Sequence
  Description of Artificial Sequence:  Target Sequence/siNA sense region
ggagacgagcuggugaagc

SEQ ID NO: 1563 - RNA, 19 nt, Artificial Sequence
  Description of Artificial Sequence:  Target Sequence/siNA sense region
cugcccgugaagcuggcag

SEQ ID NO: 1564 - RNA, 19 nt, Artificial Sequence
  Description of Artificial Sequence:  Target Sequence/siNA sense region
gcguaccccccgcccgagu

SEQ ID NO: 1565 - RNA, 19 nt, Artificial Sequence
  Description of Artificial Sequence:  Target Sequence/siNA sense region
uuccagugguacaaggaug

SEQ ID NO: 1566 - RNA, 19 nt, Artificial Sequence
  Description of Artificial Sequence:  Target Sequence/siNA sense region
ggaaaggcacuguccgggc

SEQ ID NO: 1567 - RNA, 19 nt, Artificial Sequence
  Description of Artificial Sequence:  Target Sequence/siNA sense region
cgccacaguccacaugccc

SEQ ID NO: 1568 - RNA, 19 nt, Artificial Sequence
  Description of Artificial Sequence:  Target Sequence/siNA sense region
cuggugcucaaggagguga

SEQ ID NO: 1569 - RNA, 19 nt, Artificial Sequence
  Description of Artificial Sequence:  Target Sequence/siNA sense region
acagaggccagcacaggca

SEQ ID NO: 1570 - RNA, 19 nt, Artificial Sequence
  Description of Artificial Sequence:  Target Sequence/siNA sense region
accuacacccucgcccugu

SEQ ID NO: 1571 - RNA, 19 nt, Artificial Sequence
  Description of Artificial Sequence:  Target Sequence/siNA sense region
uggaacuccgcugcuggcc

SEQ ID NO: 1572 - RNA, 19 nt, Artificial Sequence
  Description of Artificial Sequence:  Target Sequence/siNA sense region
cugaggcgcaacaucagcc

SEQ ID NO: 1573 - RNA, 19 nt, Artificial Sequence
  Description of Artificial Sequence:  Target Sequence/siNA sense region
cuggagcugguggugaaug

SEQ ID NO: 1574 - RNA, 19 nt, Artificial Sequence
  Description of Artificial Sequence:  Target Sequence/siNA sense region
gugcccccccagauacaug

SEQ ID NO: 1575 - RNA, 19 nt, Artificial Sequence
  Description of Artificial Sequence:  Target Sequence/siNA sense region
gagaaggaggccuccuccc

SEQ ID NO: 1576 - RNA, 19 nt, Artificial Sequence
  Description of Artificial Sequence:  Target Sequence/siNA sense region
cccagcaucuacucgcguc

SEQ ID NO: 1577 - RNA, 19 nt, Artificial Sequence
  Description of Artificial Sequence:  Target Sequence/siNA sense region
cacagccgccaggcccuca

SEQ ID NO: 1578 - RNA, 19 nt, Artificial Sequence
  Description of Artificial Sequence:  Target Sequence/siNA sense region
accugcacggccuacgggg

SEQ ID NO: 1579 - RNA, 19 nt, Artificial Sequence
  Description of Artificial Sequence:  Target Sequence/siNA sense region
gugccccugccucucagca

SEQ ID NO: 1580 - RNA, 19 nt, Artificial Sequence
  Description of Artificial Sequence:  Target Sequence/siNA sense region
auccaguggcacuggcggc

SEQ ID NO: 1581 - RNA, 19 nt, Artificial Sequence
  Description of Artificial Sequence:  Target Sequence/siNA sense region
cccuggacacccugcaaga

SEQ ID NO: 1582 - RNA, 19 nt, Artificial Sequence
  Description of Artificial Sequence:  Target Sequence/siNA sense region
auguuugcccagcguaguc

SEQ ID NO: 1583 - RNA, 19 nt, Artificial Sequence
  Description of Artificial Sequence:  Target Sequence/siNA sense region
cuccggcggcggcagcagc

SEQ ID NO: 1584 - RNA, 19 nt, Artificial Sequence
  Description of Artificial Sequence:  Target Sequence/siNA sense region
caagaccucaugccacagu

SEQ ID NO: 1585 - RNA, 19 nt, Artificial Sequence
  Description of Artificial Sequence:  Target Sequence/siNA sense region
ugccgugacuggagggcgg

SEQ ID NO: 1586 - RNA, 19 nt, Artificial Sequence
  Description of Artificial Sequence:  Target Sequence/siNA sense region
gugaccacgcaggaugccg

SEQ ID NO: 1587 - RNA, 19 nt, Artificial Sequence
  Description of Artificial Sequence:  Target Sequence/siNA sense region
gugaaccccaucgagagcc

SEQ ID NO: 1588 - RNA, 19 nt, Artificial Sequence
  Description of Artificial Sequence:  Target Sequence/siNA sense region
cuggacaccuggaccgagu

SEQ ID NO: 1589 - RNA, 19 nt, Artificial Sequence
  Description of Artificial Sequence:  Target Sequence/siNA sense region
uuuguggagggaaagaaua

SEQ ID NO: 1590 - RNA, 19 nt, Artificial Sequence
  Description of Artificial Sequence:  Target Sequence/siNA sense region
aagacugugagcaagcugg

SEQ ID NO: 1591 - RNA, 19 nt, Artificial Sequence
  Description of Artificial Sequence:  Target Sequence/siNA sense region
gugauccagaaugccaacg

SEQ ID NO: 1592 - RNA, 19 nt, Artificial Sequence
  Description of Artificial Sequence:  Target Sequence/siNA sense region
gugucugccauguacaagu

SEQ ID NO: 1593 - RNA, 19 nt, Artificial Sequence
  Description of Artificial Sequence:  Target Sequence/siNA sense region
uguguggucuccaacaagg

SEQ ID NO: 1594 - RNA, 19 nt, Artificial Sequence
  Description of Artificial Sequence:  Target Sequence/siNA sense region
gugggccaggaugagcggc

SEQ ID NO: 1595 - RNA, 19 nt, Artificial Sequence
  Description of Artificial Sequence:  Target Sequence/siNA sense region
cucaucuacuucuauguga

SEQ ID NO: 1596 - RNA, 19 nt, Artificial Sequence
  Description of Artificial Sequence:  Target Sequence/siNA sense region
accaccauccccgacggcu

SEQ ID NO: 1597 - RNA, 19 nt, Artificial Sequence
  Description of Artificial Sequence:  Target Sequence/siNA sense region
uucaccaucgaauccaagc

SEQ ID NO: 1598 - RNA, 19 nt, Artificial Sequence
  Description of Artificial Sequence:  Target Sequence/siNA sense region
ccauccgaggagcuacuag

SEQ ID NO: 1599 - RNA, 19 nt, Artificial Sequence
  Description of Artificial Sequence:  Target Sequence/siNA sense region
gagggccagccggugcucc

SEQ ID NO: 1600 - RNA, 19 nt, Artificial Sequence
  Description of Artificial Sequence:  Target Sequence/siNA sense region
cugagcugccaagccgaca

SEQ ID NO: 1601 - RNA, 19 nt, Artificial Sequence
  Description of Artificial Sequence:  Target Sequence/siNA sense region
agcuacaaguacgagcauc

SEQ ID NO: 1602 - RNA, 19 nt, Artificial Sequence
  Description of Artificial Sequence:  Target Sequence/siNA sense region
cugcgcugguaccgccuca

SEQ ID NO: 1603 - RNA, 19 nt, Artificial Sequence
  Description of Artificial Sequence:  Target Sequence/siNA sense region
aaccuguccacgcugcacg

SEQ ID NO: 1604 - RNA, 19 nt, Artificial Sequence
  Description of Artificial Sequence:  Target Sequence/siNA sense region
gaugcgcacgggaacccgc

SEQ ID NO: 1605 - RNA, 19 nt, Artificial Sequence
  Description of Artificial Sequence:  Target Sequence/siNA sense region
cuucugcucgacugcaaga

SEQ ID NO: 1606 - RNA, 19 nt, Artificial Sequence
  Description of Artificial Sequence:  Target Sequence/siNA sense region
aacgugcaucuguucgcca

SEQ ID NO: 1607 - RNA, 19 nt, Artificial Sequence
  Description of Artificial Sequence:  Target Sequence/siNA sense region
accccucuggccgccagcc

SEQ ID NO: 1608 - RNA, 19 nt, Artificial Sequence
  Description of Artificial Sequence:  Target Sequence/siNA sense region
cuggaggagguggcaccug

SEQ ID NO: 1609 - RNA, 19 nt, Artificial Sequence
  Description of Artificial Sequence:  Target Sequence/siNA sense region
ggggcgcgccacgccacgc

SEQ ID NO: 1610 - RNA, 19 nt, Artificial Sequence
  Description of Artificial Sequence:  Target Sequence/siNA sense region
cucagccugaguauccccc

SEQ ID NO: 1611 - RNA, 19 nt, Artificial Sequence
  Description of Artificial Sequence:  Target Sequence/siNA sense region
cgcgucgcgcccgagcacg

SEQ ID NO: 1612 - RNA, 19 nt, Artificial Sequence
  Description of Artificial Sequence:  Target Sequence/siNA sense region
gagggccacuaugugugcg

SEQ ID NO: 1613 - RNA, 19 nt, Artificial Sequence
  Description of Artificial Sequence:  Target Sequence/siNA sense region
gaagugcaagaccggcgca

SEQ ID NO: 1614 - RNA, 19 nt, Artificial Sequence
  Description of Artificial Sequence:  Target Sequence/siNA sense region
agccaugacaagcacugcc

SEQ ID NO: 1615 - RNA, 19 nt, Artificial Sequence
  Description of Artificial Sequence:  Target Sequence/siNA sense region
cacaagaaguaccugucgg

SEQ ID NO: 1616 - RNA, 19 nt, Artificial Sequence
  Description of Artificial Sequence:  Target Sequence/siNA sense region
gugcaggcccuggaagccc

SEQ ID NO: 1617 - RNA, 19 nt, Artificial Sequence
  Description of Artificial Sequence:  Target Sequence/siNA sense region
ccucggcucacgcagaacu

SEQ ID NO: 1618 - RNA, 19 nt, Artificial Sequence
  Description of Artificial Sequence:  Target Sequence/siNA sense region
uugaccgaccuccugguga

SEQ ID NO: 1619 - RNA, 19 nt, Artificial Sequence
  Description of Artificial Sequence:  Target Sequence/siNA sense region
aacgugagcgacucgcugg

SEQ ID NO: 1620 - RNA, 19 nt, Artificial Sequence
  Description of Artificial Sequence:  Target Sequence/siNA sense region
gagaugcagugcuuggugg

SEQ ID NO: 1621 - RNA, 19 nt, Artificial Sequence
  Description of Artificial Sequence:  Target Sequence/siNA sense region
gccggagcgcacgcgccca

SEQ ID NO: 1622 - RNA, 19 nt, Artificial Sequence
  Description of Artificial Sequence:  Target Sequence/siNA sense region
agcaucgugugguacaaag

SEQ ID NO: 1623 - RNA, 19 nt, Artificial Sequence
  Description of Artificial Sequence:  Target Sequence/siNA sense region
gacgagaggcugcuggagg

SEQ ID NO: 1624 - RNA, 19 nt, Artificial Sequence
  Description of Artificial Sequence:  Target Sequence/siNA sense region
gaaaagucuggagucgacu

SEQ ID NO: 1625 - RNA, 19 nt, Artificial Sequence
  Description of Artificial Sequence:  Target Sequence/siNA sense region
uuggcggacuccaaccaga

SEQ ID NO: 1626 - RNA, 19 nt, Artificial Sequence
  Description of Artificial Sequence:  Target Sequence/siNA sense region
aagcugagcauccagcgcg

SEQ ID NO: 1627 - RNA, 19 nt, Artificial Sequence
  Description of Artificial Sequence:  Target Sequence/siNA sense region
gugcgcgaggaggaugcgg

SEQ ID NO: 1628 - RNA, 19 nt, Artificial Sequence
  Description of Artificial Sequence:  Target Sequence/siNA sense region
ggaccguaucugugcagcg

SEQ ID NO: 1629 - RNA, 19 nt, Artificial Sequence
  Description of Artificial Sequence:  Target Sequence/siNA sense region
gugugcagacccaagggcu

SEQ ID NO: 1630 - RNA, 19 nt, Artificial Sequence
  Description of Artificial Sequence:  Target Sequence/siNA sense region
ugcgucaacuccuccgcca

SEQ ID NO: 1631 - RNA, 19 nt, Artificial Sequence
  Description of Artificial Sequence:  Target Sequence/siNA sense region
agcguggccguggaaggcu

SEQ ID NO: 1632 - RNA, 19 nt, Artificial Sequence
  Description of Artificial Sequence:  Target Sequence/siNA sense region
uccgaggauaagggcagca

SEQ ID NO: 1633 - RNA, 19 nt, Artificial Sequence
  Description of Artificial Sequence:  Target Sequence/siNA sense region
auggagaucgugauccuug

SEQ ID NO: 1634 - RNA, 19 nt, Artificial Sequence
  Description of Artificial Sequence:  Target Sequence/siNA sense region
gucgguaccggcgucaucg

SEQ ID NO: 1635 - RNA, 19 nt, Artificial Sequence
  Description of Artificial Sequence:  Target Sequence/siNA sense region
gcugucuucuucugggucc

SEQ ID NO: 1636 - RNA, 19 nt, Artificial Sequence
  Description of Artificial Sequence:  Target Sequence/siNA sense region
cuccuccuccucaucuucu

SEQ ID NO: 1637 - RNA, 19 nt, Artificial Sequence
  Description of Artificial Sequence:  Target Sequence/siNA sense region
uguaacaugaggaggccgg

SEQ ID NO: 1638 - RNA, 19 nt, Artificial Sequence
  Description of Artificial Sequence:  Target Sequence/siNA sense region
gcccacgcagacaucaaga

SEQ ID NO: 1639 - RNA, 19 nt, Artificial Sequence
  Description of Artificial Sequence:  Target Sequence/siNA sense region
acgggcuaccuguccauca

SEQ ID NO: 1640 - RNA, 19 nt, Artificial Sequence
  Description of Artificial Sequence:  Target Sequence/siNA sense region
aucauggaccccggggagg

SEQ ID NO: 1641 - RNA, 19 nt, Artificial Sequence
  Description of Artificial Sequence:  Target Sequence/siNA sense region
gugccucuggaggagcaau

SEQ ID NO: 1642 - RNA, 19 nt, Artificial Sequence
  Description of Artificial Sequence:  Target Sequence/siNA sense region
ugcgaauaccuguccuacg

SEQ ID NO: 1643 - RNA, 19 nt, Artificial Sequence
  Description of Artificial Sequence:  Target Sequence/siNA sense region
gaugccagccagugggaau

SEQ ID NO: 1644 - RNA, 19 nt, Artificial Sequence
  Description of Artificial Sequence:  Target Sequence/siNA sense region
uucccccgagagcggcugc

SEQ ID NO: 1645 - RNA, 19 nt, Artificial Sequence
  Description of Artificial Sequence:  Target Sequence/siNA sense region
caccuggggagagugcucg

SEQ ID NO: 1646 - RNA, 19 nt, Artificial Sequence
  Description of Artificial Sequence:  Target Sequence/siNA sense region
ggcuacggcgccuucggga

SEQ ID NO: 1647 - RNA, 19 nt, Artificial Sequence
  Description of Artificial Sequence:  Target Sequence/siNA sense region
aaggugguggaagccuccg

SEQ ID NO: 1648 - RNA, 19 nt, Artificial Sequence
  Description of Artificial Sequence:  Target Sequence/siNA sense region
gcuuucggcauccacaagg

SEQ ID NO: 1649 - RNA, 19 nt, Artificial Sequence
  Description of Artificial Sequence:  Target Sequence/siNA sense region
ggcagcagcugugacaccg

SEQ ID NO: 1650 - RNA, 19 nt, Artificial Sequence
  Description of Artificial Sequence:  Target Sequence/siNA sense region
guggccgugaaaaugcuga

SEQ ID NO: 1651 - RNA, 19 nt, Artificial Sequence
  Description of Artificial Sequence:  Target Sequence/siNA sense region
aaagagggcgccacggcca

SEQ ID NO: 1652 - RNA, 19 nt, Artificial Sequence
  Description of Artificial Sequence:  Target Sequence/siNA sense region
agcgagcagcgcgcgcuga

SEQ ID NO: 1653 - RNA, 19 nt, Artificial Sequence
  Description of Artificial Sequence:  Target Sequence/siNA sense region
augucggagcucaagaucc

SEQ ID NO: 1654 - RNA, 19 nt, Artificial Sequence
  Description of Artificial Sequence:  Target Sequence/siNA sense region
cucauucacaucggcaacc

SEQ ID NO: 1655 - RNA, 19 nt, Artificial Sequence
  Description of Artificial Sequence:  Target Sequence/siNA sense region
caccucaacguggucaacc

SEQ ID NO: 1656 - RNA, 19 nt, Artificial Sequence
  Description of Artificial Sequence:  Target Sequence/siNA sense region
cuccucggggcgugcacca

SEQ ID NO: 1657 - RNA, 19 nt, Artificial Sequence
  Description of Artificial Sequence:  Target Sequence/siNA sense region
aagccgcagggcccccuca

SEQ ID NO: 1658 - RNA, 19 nt, Artificial Sequence
  Description of Artificial Sequence:  Target Sequence/siNA sense region
auggugaucguggaguucu

SEQ ID NO: 1659 - RNA, 19 nt, Artificial Sequence
  Description of Artificial Sequence:  Target Sequence/siNA sense region
ugcaaguacggcaaccucu

SEQ ID NO: 1660 - RNA, 19 nt, Artificial Sequence
  Description of Artificial Sequence:  Target Sequence/siNA sense region
uccaacuuccugcgcgcca

SEQ ID NO: 1661 - RNA, 19 nt, Artificial Sequence
  Description of Artificial Sequence:  Target Sequence/siNA sense region
aagcgggacgccuucagcc

SEQ ID NO: 1662 - RNA, 19 nt, Artificial Sequence
  Description of Artificial Sequence:  Target Sequence/siNA sense region
cccugcgcggagaagucuc

SEQ ID NO: 1663 - RNA, 19 nt, Artificial Sequence
  Description of Artificial Sequence:  Target Sequence/siNA sense region
cccgagcagcgcggacgcu

SEQ ID NO: 1664 - RNA, 19 nt, Artificial Sequence
  Description of Artificial Sequence:  Target Sequence/siNA sense region
uuccgcgccaugguggagc

SEQ ID NO: 1665 - RNA, 19 nt, Artificial Sequence
  Description of Artificial Sequence:  Target Sequence/siNA sense region
cucgccaggcuggaucgga

SEQ ID NO: 1666 - RNA, 19 nt, Artificial Sequence
  Description of Artificial Sequence:  Target Sequence/siNA sense region
aggcggccggggagcagcg

SEQ ID NO: 1667 - RNA, 19 nt, Artificial Sequence
  Description of Artificial Sequence:  Target Sequence/siNA sense region
gacaggguccucuucgcgc

SEQ ID NO: 1668 - RNA, 19 nt, Artificial Sequence
  Description of Artificial Sequence:  Target Sequence/siNA sense region
cgguucucgaagaccgagg

SEQ ID NO: 1669 - RNA, 19 nt, Artificial Sequence
  Description of Artificial Sequence:  Target Sequence/siNA sense region
ggcggagcgaggcgggcuu

SEQ ID NO: 1670 - RNA, 19 nt, Artificial Sequence
  Description of Artificial Sequence:  Target Sequence/siNA sense region
ucuccagaccaagaagcug

SEQ ID NO: 1671 - RNA, 19 nt, Artificial Sequence
  Description of Artificial Sequence:  Target Sequence/siNA sense region
gaggaccuguggcugagcc

SEQ ID NO: 1672 - RNA, 19 nt, Artificial Sequence
  Description of Artificial Sequence:  Target Sequence/siNA sense region
ccgcugaccauggaagauc

SEQ ID NO: 1673 - RNA, 19 nt, Artificial Sequence
  Description of Artificial Sequence:  Target Sequence/siNA sense region
cuugucugcuacagcuucc

SEQ ID NO: 1674 - RNA, 19 nt, Artificial Sequence
  Description of Artificial Sequence:  Target Sequence/siNA sense region
cagguggccagagggaugg

SEQ ID NO: 1675 - RNA, 19 nt, Artificial Sequence
  Description of Artificial Sequence:  Target Sequence/siNA sense region
gaguuccuggcuucccgaa

SEQ ID NO: 1676 - RNA, 19 nt, Artificial Sequence
  Description of Artificial Sequence:  Target Sequence/siNA sense region
aagugcauccacagagacc

SEQ ID NO: 1677 - RNA, 19 nt, Artificial Sequence
  Description of Artificial Sequence:  Target Sequence/siNA sense region
cuggcugcucggaacauuc

SEQ ID NO: 1678 - RNA, 19 nt, Artificial Sequence
  Description of Artificial Sequence:  Target Sequence/siNA sense region
cugcugucggaaagcgacg

SEQ ID NO: 1679 - RNA, 19 nt, Artificial Sequence
  Description of Artificial Sequence:  Target Sequence/siNA sense region
guggugaagaucugugacu

SEQ ID NO: 1680 - RNA, 19 nt, Artificial Sequence
  Description of Artificial Sequence:  Target Sequence/siNA sense region
uuuggccuugcccgggaca

SEQ ID NO: 1681 - RNA, 19 nt, Artificial Sequence
  Description of Artificial Sequence:  Target Sequence/siNA sense region
aucuacaaagaccccgacu

SEQ ID NO: 1682 - RNA, 19 nt, Artificial Sequence
  Description of Artificial Sequence:  Target Sequence/siNA sense region
uacguccgcaagggcagug

SEQ ID NO: 1683 - RNA, 19 nt, Artificial Sequence
  Description of Artificial Sequence:  Target Sequence/siNA sense region
gcccggcugccccugaagu

SEQ ID NO: 1684 - RNA, 19 nt, Artificial Sequence
  Description of Artificial Sequence:  Target Sequence/siNA sense region
uggauggccccugaaagca

SEQ ID NO: 1685 - RNA, 19 nt, Artificial Sequence
  Description of Artificial Sequence:  Target Sequence/siNA sense region
aucuucgacaagguguaca

SEQ ID NO: 1686 - RNA, 19 nt, Artificial Sequence
  Description of Artificial Sequence:  Target Sequence/siNA sense region
accacgcagagugacgugu

SEQ ID NO: 1687 - RNA, 19 nt, Artificial Sequence
  Description of Artificial Sequence:  Target Sequence/siNA sense region
ugguccuuuggggugcuuc

SEQ ID NO: 1688 - RNA, 19 nt, Artificial Sequence
  Description of Artificial Sequence:  Target Sequence/siNA sense region
cucugggagaucuucucuc

SEQ ID NO: 1689 - RNA, 19 nt, Artificial Sequence
  Description of Artificial Sequence:  Target Sequence/siNA sense region
cugggggccuccccguacc

SEQ ID NO: 1690 - RNA, 19 nt, Artificial Sequence
  Description of Artificial Sequence:  Target Sequence/siNA sense region
ccuggggugcagaucaaug

SEQ ID NO: 1691 - RNA, 19 nt, Artificial Sequence
  Description of Artificial Sequence:  Target Sequence/siNA sense region
gaggaguucugccagcgcg

SEQ ID NO: 1692 - RNA, 19 nt, Artificial Sequence
  Description of Artificial Sequence:  Target Sequence/siNA sense region
gugagagacggcacaagga

SEQ ID NO: 1693 - RNA, 19 nt, Artificial Sequence
  Description of Artificial Sequence:  Target Sequence/siNA sense region
augagggccccggagcugg

SEQ ID NO: 1694 - RNA, 19 nt, Artificial Sequence
  Description of Artificial Sequence:  Target Sequence/siNA sense region
gccacucccgccauacgcc

SEQ ID NO: 1695 - RNA, 19 nt, Artificial Sequence
  Description of Artificial Sequence:  Target Sequence/siNA sense region
cacaucaugcugaacugcu

SEQ ID NO: 1696 - RNA, 19 nt, Artificial Sequence
  Description of Artificial Sequence:  Target Sequence/siNA sense region
ugguccggagaccccaagg

SEQ ID NO: 1697 - RNA, 19 nt, Artificial Sequence
  Description of Artificial Sequence:  Target Sequence/siNA sense region
gcgagaccugcauucucgg

SEQ ID NO: 1698 - RNA, 19 nt, Artificial Sequence
  Description of Artificial Sequence:  Target Sequence/siNA sense region
gaccugguggagauccugg

SEQ ID NO: 1699 - RNA, 19 nt, Artificial Sequence
  Description of Artificial Sequence:  Target Sequence/siNA sense region
ggggaccugcuccagggca

SEQ ID NO: 1700 - RNA, 19 nt, Artificial Sequence
  Description of Artificial Sequence:  Target Sequence/siNA sense region
aggggccugcaagaggaag

SEQ ID NO: 1701 - RNA, 19 nt, Artificial Sequence
  Description of Artificial Sequence:  Target Sequence/siNA sense region
gaggaggucugcauggccc

SEQ ID NO: 1702 - RNA, 19 nt, Artificial Sequence
  Description of Artificial Sequence:  Target Sequence/siNA sense region
ccgcgcagcucucagagcu

SEQ ID NO: 1703 - RNA, 19 nt, Artificial Sequence
  Description of Artificial Sequence:  Target Sequence/siNA sense region
ucagaagagggcagcuucu

SEQ ID NO: 1704 - RNA, 19 nt, Artificial Sequence
  Description of Artificial Sequence:  Target Sequence/siNA sense region
ucgcagguguccaccaugg

SEQ ID NO: 1705 - RNA, 19 nt, Artificial Sequence
  Description of Artificial Sequence:  Target Sequence/siNA sense region
gcccuacacaucgcccagg

SEQ ID NO: 1706 - RNA, 19 nt, Artificial Sequence
  Description of Artificial Sequence:  Target Sequence/siNA sense region
gcugacgcugaggacagcc

SEQ ID NO: 1707 - RNA, 19 nt, Artificial Sequence
  Description of Artificial Sequence:  Target Sequence/siNA sense region
ccgccaagccugcagcgcc

SEQ ID NO: 1708 - RNA, 19 nt, Artificial Sequence
  Description of Artificial Sequence:  Target Sequence/siNA sense region
cacagccuggccgccaggu

SEQ ID NO: 1709 - RNA, 19 nt, Artificial Sequence
  Description of Artificial Sequence:  Target Sequence/siNA sense region
uauuacaacuggguguccu

SEQ ID NO: 1710 - RNA, 19 nt, Artificial Sequence
  Description of Artificial Sequence:  Target Sequence/siNA sense region
uuucccgggugccuggcca

SEQ ID NO: 1711 - RNA, 19 nt, Artificial Sequence
  Description of Artificial Sequence:  Target Sequence/siNA sense region
agaggggcugagacccgug

SEQ ID NO: 1712 - RNA, 19 nt, Artificial Sequence
  Description of Artificial Sequence:  Target Sequence/siNA sense region
gguuccuccaggaugaaga

SEQ ID NO: 1713 - RNA, 19 nt, Artificial Sequence
  Description of Artificial Sequence:  Target Sequence/siNA sense region
acauuugaggaauucccca

SEQ ID NO: 1714 - RNA, 19 nt, Artificial Sequence
  Description of Artificial Sequence:  Target Sequence/siNA sense region
augaccccaacgaccuaca

SEQ ID NO: 1715 - RNA, 19 nt, Artificial Sequence
  Description of Artificial Sequence:  Target Sequence/siNA sense region
aaaggcucuguggacaacc

SEQ ID NO: 1716 - RNA, 19 nt, Artificial Sequence
  Description of Artificial Sequence:  Target Sequence/siNA sense region
cagacagacagugggaugg

SEQ ID NO: 1717 - RNA, 19 nt, Artificial Sequence
  Description of Artificial Sequence:  Target Sequence/siNA sense region
gugcuggccucggaggagu

SEQ ID NO: 1718 - RNA, 19 nt, Artificial Sequence
  Description of Artificial Sequence:  Target Sequence/siNA sense region
uuugagcagauagagagca

SEQ ID NO: 1719 - RNA, 19 nt, Artificial Sequence
  Description of Artificial Sequence:  Target Sequence/siNA sense region
aggcauagacaagaaagcg

SEQ ID NO: 1720 - RNA, 19 nt, Artificial Sequence
  Description of Artificial Sequence:  Target Sequence/siNA sense region
ggcuucagguagcugaagc

SEQ ID NO: 1721 - RNA, 19 nt, Artificial Sequence
  Description of Artificial Sequence:  Target Sequence/siNA sense region
cagagagagagaaggcagc

SEQ ID NO: 1722 - RNA, 19 nt, Artificial Sequence
  Description of Artificial Sequence:  Target Sequence/siNA sense region
cauacgucagcauuuucuu

SEQ ID NO: 1723 - RNA, 19 nt, Artificial Sequence
  Description of Artificial Sequence:  Target Sequence/siNA sense region
ucucugcacuuauaagaaa

SEQ ID NO: 1724 - RNA, 19 nt, Artificial Sequence
  Description of Artificial Sequence:  Target Sequence/siNA sense region
agaucaaagacuuuaagac

SEQ ID NO: 1725 - RNA, 19 nt, Artificial Sequence
  Description of Artificial Sequence:  Target Sequence/siNA sense region
cuuucgcuauuucuucuac

SEQ ID NO: 1726 - RNA, 19 nt, Artificial Sequence
  Description of Artificial Sequence:  Target Sequence/siNA sense region
cugcuaucuacuacaaacu

SEQ ID NO: 1727 - RNA, 19 nt, Artificial Sequence
  Description of Artificial Sequence:  Target Sequence/siNA sense region
uucaaagaggaaccaggag

SEQ ID NO: 1728 - RNA, 19 nt, Artificial Sequence
  Description of Artificial Sequence:  Target Sequence/siNA sense region
ggacaagaggagcaugaaa

SEQ ID NO: 1729 - RNA, 19 nt, Artificial Sequence
  Description of Artificial Sequence:  Target Sequence/siNA sense region
aguggacaaggagugugac

SEQ ID NO: 1730 - RNA, 19 nt, Artificial Sequence
  Description of Artificial Sequence:  Target Sequence/siNA sense region
ccacugaagcaccacaggg

SEQ ID NO: 1731 - RNA, 19 nt, Artificial Sequence
  Description of Artificial Sequence:  Target Sequence/siNA sense region
gagggguuaggccuccgga

SEQ ID NO: 1732 - RNA, 19 nt, Artificial Sequence
  Description of Artificial Sequence:  Target Sequence/siNA sense region
augacugcgggcaggccug

SEQ ID NO: 1733 - RNA, 19 nt, Artificial Sequence
  Description of Artificial Sequence:  Target Sequence/siNA sense region
ggauaauauccagccuccc

SEQ ID NO: 1734 - RNA, 19 nt, Artificial Sequence
  Description of Artificial Sequence:  Target Sequence/siNA sense region
cacaagaagcugguggagc

SEQ ID NO: 1735 - RNA, 19 nt, Artificial Sequence
  Description of Artificial Sequence:  Target Sequence/siNA sense region
cagaguguucccugacucc

SEQ ID NO: 1736 - RNA, 19 nt, Artificial Sequence
  Description of Artificial Sequence:  Target Sequence/siNA sense region
cuccaaggaaagggagacg

SEQ ID NO: 1737 - RNA, 19 nt, Artificial Sequence
  Description of Artificial Sequence:  Target Sequence/siNA sense region
gcccuuucauggucugcug

SEQ ID NO: 1738 - RNA, 19 nt, Artificial Sequence
  Description of Artificial Sequence:  Target Sequence/siNA sense region
gaguaacaggugccuuccc

SEQ ID NO: 1739 - RNA, 19 nt, Artificial Sequence
  Description of Artificial Sequence:  Target Sequence/siNA sense region
cagacacuggcguuacugc

SEQ ID NO: 1740 - RNA, 19 nt, Artificial Sequence
  Description of Artificial Sequence:  Target Sequence/siNA sense region
cuugaccaaagagcccuca

SEQ ID NO: 1741 - RNA, 19 nt, Artificial Sequence
  Description of Artificial Sequence:  Target Sequence/siNA sense region
aagcggcccuuaugccagc

SEQ ID NO: 1742 - RNA, 19 nt, Artificial Sequence
  Description of Artificial Sequence:  Target Sequence/siNA sense region
cgugacagagggcucaccu

SEQ ID NO: 1743 - RNA, 19 nt, Artificial Sequence
  Description of Artificial Sequence:  Target Sequence/siNA sense region
ucuugccuucuaggucacu

SEQ ID NO: 1744 - RNA, 19 nt, Artificial Sequence
  Description of Artificial Sequence:  Target Sequence/siNA sense region
uucucacaaugucccuuca

SEQ ID NO: 1745 - RNA, 19 nt, Artificial Sequence
  Description of Artificial Sequence:  Target Sequence/siNA sense region
agcaccugacccugugccc

SEQ ID NO: 1746 - RNA, 19 nt, Artificial Sequence
  Description of Artificial Sequence:  Target Sequence/siNA sense region
cgccgauuauuccuuggua

SEQ ID NO: 1747 - RNA, 19 nt, Artificial Sequence
  Description of Artificial Sequence:  Target Sequence/siNA sense region
aauaugaguaauacaucaa

SEQ ID NO: 1748 - RNA, 19 nt, Artificial Sequence
  Description of Artificial Sequence:  Target Sequence/siNA sense region
aagaguaguauuaaaagcu

SEQ ID NO: 1749 - RNA, 19 nt, Artificial Sequence
  Description of Artificial Sequence:  Target Sequence/siNA sense region
uaauuaaucauguuuauaa

SEQ ID NO: 1750 - RNA, 19 nt, Artificial Sequence
  Description of Artificial Sequence:  siNA antisense region
ccggccgcugcgcgugggu

SEQ ID NO: 1751 - RNA, 19 nt, Artificial Sequence
  Description of Artificial Sequence:  siNA antisense region
cggcgccccgcugcaucuc

SEQ ID NO: 1752 - RNA, 19 nt, Artificial Sequence
  Description of Artificial Sequence:  siNA antisense region
acagucgcaggcacagcgc

SEQ ID NO: 1753 - RNA, 19 nt, Artificial Sequence
  Description of Artificial Sequence:  siNA antisense region
ggagucccaggcagagcca

SEQ ID NO: 1754 - RNA, 19 nt, Artificial Sequence
  Description of Artificial Sequence:  siNA antisense region
cacucaccaggccguccag

SEQ ID NO: 1755 - RNA, 19 nt, Artificial Sequence
  Description of Artificial Sequence:  siNA antisense region
ggggggucauggaguaguc

SEQ ID NO: 1756 - RNA, 19 nt, Artificial Sequence
  Description of Artificial Sequence:  siNA antisense region
ccgugauguucaaggucgg

SEQ ID NO: 1757 - RNA, 19 nt, Artificial Sequence
  Description of Artificial Sequence:  siNA antisense region
cgaugacgugugacuccuc

SEQ ID NO: 1758 - RNA, 19 nt, Artificial Sequence
  Description of Artificial Sequence:  siNA antisense region
acaggcugucaccgguguc

SEQ ID NO: 1759 - RNA, 19 nt, Artificial Sequence
  Description of Artificial Sequence:  siNA antisense region
guccccugcaggagaugga

SEQ ID NO: 1760 - RNA, 19 nt, Artificial Sequence
  Description of Artificial Sequence:  siNA antisense region
cccacucgagggggugcug

SEQ ID NO: 1761 - RNA, 19 nt, Artificial Sequence
  Description of Artificial Sequence:  siNA antisense region
ccugagcuccuggccaagc

SEQ ID NO: 1762 - RNA, 19 nt, Artificial Sequence
  Description of Artificial Sequence:  siNA antisense region
cuccgguggcuggcgccuc

SEQ ID NO: 1763 - RNA, 19 nt, Artificial Sequence
  Description of Artificial Sequence:  siNA antisense region
uguccucgcuguccuuguc

SEQ ID NO: 1764 - RNA, 19 nt, Artificial Sequence
  Description of Artificial Sequence:  siNA antisense region
agucucgcaccacccccgu

SEQ ID NO: 1765 - RNA, 19 nt, Artificial Sequence
  Description of Artificial Sequence:  siNA antisense region
uggcgucugugcccucgca

SEQ ID NO: 1766 - RNA, 19 nt, Artificial Sequence
  Description of Artificial Sequence:  siNA antisense region
acaccuugcaguagggccu

SEQ ID NO: 1767 - RNA, 19 nt, Artificial Sequence
  Description of Artificial Sequence:  siNA antisense region
guaccucgugcagcagcaa

SEQ ID NO: 1768 - RNA, 19 nt, Artificial Sequence
  Description of Artificial Sequence:  siNA antisense region
ugccugugucguuggcaug

SEQ ID NO: 1769 - RNA, 19 nt, Artificial Sequence
  Description of Artificial Sequence:  siNA antisense region
uguaguagcagacguagcu

SEQ ID NO: 1770 - RNA, 19 nt, Artificial Sequence
  Description of Artificial Sequence:  siNA antisense region
ugcgugccuugauguacuu

SEQ ID NO: 1771 - RNA, 19 nt, Artificial Sequence
  Description of Artificial Sequence:  siNA antisense region
cggccguggugcccucgau

SEQ ID NO: 1772 - RNA, 19 nt, Artificial Sequence
  Description of Artificial Sequence:  siNA antisense region
cgaacacguaggagcuggc

SEQ ID NO: 1773 - RNA, 19 nt, Artificial Sequence
  Description of Artificial Sequence:  siNA antisense region
gcugcucaaagucucucac

SEQ ID NO: 1774 - RNA, 19 nt, Artificial Sequence
  Description of Artificial Sequence:  siNA antisense region
caggcuuguugaugaaugg

SEQ ID NO: 1775 - RNA, 19 nt, Artificial Sequence
  Description of Artificial Sequence:  siNA antisense region
uguugaccaagagcguguc

SEQ ID NO: 1776 - RNA, 19 nt, Artificial Sequence
  Description of Artificial Sequence:  siNA antisense region
cccacauggcguccuuccu

SEQ ID NO: 1777 - RNA, 19 nt, Artificial Sequence
  Description of Artificial Sequence:  siNA antisense region
uggacaccagacagggcac

SEQ ID NO: 1778 - RNA, 19 nt, Artificial Sequence
  Description of Artificial Sequence:  siNA antisense region
ugacauugaggccggggau

SEQ ID NO: 1779 - RNA, 19 nt, Artificial Sequence
  Description of Artificial Sequence:  siNA antisense region
agcuuugcgagcgcagcgu

SEQ ID NO: 1780 - RNA, 19 nt, Artificial Sequence
  Description of Artificial Sequence:  siNA antisense region
cgucuggccacagcaccga

SEQ ID NO: 1781 - RNA, 19 nt, Artificial Sequence
  Description of Artificial Sequence:  siNA antisense region
cccacaccaccuccugccc

SEQ ID NO: 1782 - RNA, 19 nt, Artificial Sequence
  Description of Artificial Sequence:  siNA antisense region
gcaugccccgccggucauc

SEQ ID NO: 1783 - RNA, 19 nt, Artificial Sequence
  Description of Artificial Sequence:  siNA antisense region
gcaguggcguggacacgag

SEQ ID NO: 1784 - RNA, 19 nt, Artificial Sequence
  Description of Artificial Sequence:  siNA antisense region
gguacagggcaucgugcag

SEQ ID NO: 1785 - RNA, 19 nt, Artificial Sequence
  Description of Artificial Sequence:  siNA antisense region
agguggucucgcacugcag

SEQ ID NO: 1786 - RNA, 19 nt, Artificial Sequence
  Description of Artificial Sequence:  siNA antisense region
ggaaguccuggucucccca

SEQ ID NO: 1787 - RNA, 19 nt, Artificial Sequence
  Description of Artificial Sequence:  siNA antisense region
ccaggaagggguuggaaag

SEQ ID NO: 1788 - RNA, 19 nt, Artificial Sequence
  Description of Artificial Sequence:  siNA antisense region
cguugccugugaugugcac

SEQ ID NO: 1789 - RNA, 19 nt, Artificial Sequence
  Description of Artificial Sequence:  siNA antisense region
gcuggaugucauagagcuc

SEQ ID NO: 1790 - RNA, 19 nt, Artificial Sequence
  Description of Artificial Sequence:  siNA antisense region
gcgacuuccugggcaacag

SEQ ID NO: 1791 - RNA, 19 nt, Artificial Sequence
  Description of Artificial Sequence:  siNA antisense region
ccccuaccagcagcuccag

SEQ ID NO: 1792 - RNA, 19 nt, Artificial Sequence
  Description of Artificial Sequence:  siNA antisense region
aguugaggaccagcuucuc

SEQ ID NO: 1793 - RNA, 19 nt, Artificial Sequence
  Description of Artificial Sequence:  siNA antisense region
acucagcccacacggugca

SEQ ID NO: 1794 - RNA, 19 nt, Artificial Sequence
  Description of Artificial Sequence:  siNA antisense region
aggugacaccugaguuaaa

SEQ ID NO: 1795 - RNA, 19 nt, Artificial Sequence
  Description of Artificial Sequence:  siNA antisense region
cuggguagucccagucaaa

SEQ ID NO: 1796 - RNA, 19 nt, Artificial Sequence
  Description of Artificial Sequence:  siNA antisense region
cccgcucugccugcuuccc

SEQ ID NO: 1797 - RNA, 19 nt, Artificial Sequence
  Description of Artificial Sequence:  siNA antisense region
gcucgggcacccacuuacc

SEQ ID NO: 1798 - RNA, 19 nt, Artificial Sequence
  Description of Artificial Sequence:  siNA antisense region
gggucuguugggagcgucg

SEQ ID NO: 1799 - RNA, 19 nt, Artificial Sequence
  Description of Artificial Sequence:  siNA antisense region
ugcuggagaguucugugug

SEQ ID NO: 1800 - RNA, 19 nt, Artificial Sequence
  Description of Artificial Sequence:  siNA antisense region
cguuguggauggucaggau

SEQ ID NO: 1801 - RNA, 19 nt, Artificial Sequence
  Description of Artificial Sequence:  siNA antisense region
ccaggucgugcuggcugac

SEQ ID NO: 1802 - RNA, 19 nt, Artificial Sequence
  Description of Artificial Sequence:  siNA antisense region
ccuugcacacauacgagcc

SEQ ID NO: 1803 - RNA, 19 nt, Artificial Sequence
  Description of Artificial Sequence:  siNA antisense region
gcuggaugccguuguuggc

SEQ ID NO: 1804 - RNA, 19 nt, Artificial Sequence
  Description of Artificial Sequence:  siNA antisense region
cggugcucucccgaaaucg

SEQ ID NO: 1805 - RNA, 19 nt, Artificial Sequence
  Description of Artificial Sequence:  siNA antisense region
uuucaugcacaaugaccuc

SEQ ID NO: 1806 - RNA, 19 nt, Artificial Sequence
  Description of Artificial Sequence:  siNA antisense region
cgacgcugaugaagggauu

SEQ ID NO: 1807 - RNA, 19 nt, Artificial Sequence
  Description of Artificial Sequence:  siNA antisense region
uggguccuuugagccacuc

SEQ ID NO: 1808 - RNA, 19 nt, Artificial Sequence
  Description of Artificial Sequence:  siNA antisense region
cugccguggccuccaggau

SEQ ID NO: 1809 - RNA, 19 nt, Artificial Sequence
  Description of Artificial Sequence:  siNA antisense region
gcuucaccagcucgucucc

SEQ ID NO: 1810 - RNA, 19 nt, Artificial Sequence
  Description of Artificial Sequence:  siNA antisense region
cugccagcuucacgggcag

SEQ ID NO: 1811 - RNA, 19 nt, Artificial Sequence
  Description of Artificial Sequence:  siNA antisense region
acucgggcgggggguacgc

SEQ ID NO: 1812 - RNA, 19 nt, Artificial Sequence
  Description of Artificial Sequence:  siNA antisense region
cauccuuguaccacuggaa

SEQ ID NO: 1813 - RNA, 19 nt, Artificial Sequence
  Description of Artificial Sequence:  siNA antisense region
gcccggacagugccuuucc

SEQ ID NO: 1814 - RNA, 19 nt, Artificial Sequence
  Description of Artificial Sequence:  siNA antisense region
gggcauguggacuguggcg

SEQ ID NO: 1815 - RNA, 19 nt, Artificial Sequence
  Description of Artificial Sequence:  siNA antisense region
ucaccuccuugagcaccag

SEQ ID NO: 1816 - RNA, 19 nt, Artificial Sequence
  Description of Artificial Sequence:  siNA antisense region
ugccugugcuggccucugu

SEQ ID NO: 1817 - RNA, 19 nt, Artificial Sequence
  Description of Artificial Sequence:  siNA antisense region
acagggcgaggguguaggu

SEQ ID NO: 1818 - RNA, 19 nt, Artificial Sequence
  Description of Artificial Sequence:  siNA antisense region
ggccagcagcggaguucca

SEQ ID NO: 1819 - RNA, 19 nt, Artificial Sequence
  Description of Artificial Sequence:  siNA antisense region
ggcugauguugcgccucag

SEQ ID NO: 1820 - RNA, 19 nt, Artificial Sequence
  Description of Artificial Sequence:  siNA antisense region
cauucaccaccagcuccag

SEQ ID NO: 1821 - RNA, 19 nt, Artificial Sequence
  Description of Artificial Sequence:  siNA antisense region
cauguaucugggggggcac

SEQ ID NO: 1822 - RNA, 19 nt, Artificial Sequence
  Description of Artificial Sequence:  siNA antisense region
gggaggaggccuccuucuc

SEQ ID NO: 1823 - RNA, 19 nt, Artificial Sequence
  Description of Artificial Sequence:  siNA antisense region
gacgcgaguagaugcuggg

SEQ ID NO: 1824 - RNA, 19 nt, Artificial Sequence
  Description of Artificial Sequence:  siNA antisense region
ugagggccuggcggcugug

SEQ ID NO: 1825 - RNA, 19 nt, Artificial Sequence
  Description of Artificial Sequence:  siNA antisense region
ccccguaggccgugcaggu

SEQ ID NO: 1826 - RNA, 19 nt, Artificial Sequence
  Description of Artificial Sequence:  siNA antisense region
ugcugagaggcaggggcac

SEQ ID NO: 1827 - RNA, 19 nt, Artificial Sequence
  Description of Artificial Sequence:  siNA antisense region
gccgccagugccacuggau

SEQ ID NO: 1828 - RNA, 19 nt, Artificial Sequence
  Description of Artificial Sequence:  siNA antisense region
ucuugcaggguguccaggg

SEQ ID NO: 1829 - RNA, 19 nt, Artificial Sequence
  Description of Artificial Sequence:  siNA antisense region
gacuacgcugggcaaacau

SEQ ID NO: 1830 - RNA, 19 nt, Artificial Sequence
  Description of Artificial Sequence:  siNA antisense region
gcugcugccgccgccggag

SEQ ID NO: 1831 - RNA, 19 nt, Artificial Sequence
  Description of Artificial Sequence:  siNA antisense region
acuguggcaugaggucuug

SEQ ID NO: 1832 - RNA, 19 nt, Artificial Sequence
  Description of Artificial Sequence:  siNA antisense region
ccgcccuccagucacggca

SEQ ID NO: 1833 - RNA, 19 nt, Artificial Sequence
  Description of Artificial Sequence:  siNA antisense region
cggcauccugcguggucac

SEQ ID NO: 1834 - RNA, 19 nt, Artificial Sequence
  Description of Artificial Sequence:  siNA antisense region
ggcucucgaugggguucac

SEQ ID NO: 1835 - RNA, 19 nt, Artificial Sequence
  Description of Artificial Sequence:  siNA antisense region
acucgguccagguguccag

SEQ ID NO: 1836 - RNA, 19 nt, Artificial Sequence
  Description of Artificial Sequence:  siNA antisense region
uauucuuucccuccacaaa

SEQ ID NO: 1837 - RNA, 19 nt, Artificial Sequence
  Description of Artificial Sequence:  siNA antisense region
ccagcuugcucacagucuu

SEQ ID NO: 1838 - RNA, 19 nt, Artificial Sequence
  Description of Artificial Sequence:  siNA antisense region
cguuggcauucuggaucac

SEQ ID NO: 1839 - RNA, 19 nt, Artificial Sequence
  Description of Artificial Sequence:  siNA antisense region
acuuguacauggcagacac

SEQ ID NO: 1840 - RNA, 19 nt, Artificial Sequence
  Description of Artificial Sequence:  siNA antisense region
ccuuguuggagaccacaca

SEQ ID NO: 1841 - RNA, 19 nt, Artificial Sequence
  Description of Artificial Sequence:  siNA antisense region
gccgcucauccuggcccac

SEQ ID NO: 1842 - RNA, 19 nt, Artificial Sequence
  Description of Artificial Sequence:  siNA antisense region
ucacauagaaguagaugag

SEQ ID NO: 1843 - RNA, 19 nt, Artificial Sequence
  Description of Artificial Sequence:  siNA antisense region
agccgucggggaugguggu

SEQ ID NO: 1844 - RNA, 19 nt, Artificial Sequence
  Description of Artificial Sequence:  siNA antisense region
gcuuggauucgauggugaa

SEQ ID NO: 1845 - RNA, 19 nt, Artificial Sequence
  Description of Artificial Sequence:  siNA antisense region
cuaguagcuccucggaugg

SEQ ID NO: 1846 - RNA, 19 nt, Artificial Sequence
  Description of Artificial Sequence:  siNA antisense region
ggagcaccggcuggcccuc

SEQ ID NO: 1847 - RNA, 19 nt, Artificial Sequence
  Description of Artificial Sequence:  siNA antisense region
ugucggcuuggcagcucag

SEQ ID NO: 1848 - RNA, 19 nt, Artificial Sequence
  Description of Artificial Sequence:  siNA antisense region
gaugcucguacuuguagcu

SEQ ID NO: 1849 - RNA, 19 nt, Artificial Sequence
  Description of Artificial Sequence:  siNA antisense region
ugaggcgguaccagcgcag

SEQ ID NO: 1850 - RNA, 19 nt, Artificial Sequence
  Description of Artificial Sequence:  siNA antisense region
cgugcagcguggacagguu

SEQ ID NO: 1851 - RNA, 19 nt, Artificial Sequence
  Description of Artificial Sequence:  siNA antisense region
gcggguucccgugcgcauc

SEQ ID NO: 1852 - RNA, 19 nt, Artificial Sequence
  Description of Artificial Sequence:  siNA antisense region
ucuugcagucgagcagaag

SEQ ID NO: 1853 - RNA, 19 nt, Artificial Sequence
  Description of Artificial Sequence:  siNA antisense region
uggcgaacagaugcacguu

SEQ ID NO: 1854 - RNA, 19 nt, Artificial Sequence
  Description of Artificial Sequence:  siNA antisense region
ggcuggcggccagaggggu

SEQ ID NO: 1855 - RNA, 19 nt, Artificial Sequence
  Description of Artificial Sequence:  siNA antisense region
caggugccaccuccuccag

SEQ ID NO: 1856 - RNA, 19 nt, Artificial Sequence
  Description of Artificial Sequence:  siNA antisense region
gcguggcguggcgcgcccc

SEQ ID NO: 1857 - RNA, 19 nt, Artificial Sequence
  Description of Artificial Sequence:  siNA antisense region
gggggauacucaggcugag

SEQ ID NO: 1858 - RNA, 19 nt, Artificial Sequence
  Description of Artificial Sequence:  siNA antisense region
cgugcucgggcgcgacgcg

SEQ ID NO: 1859 - RNA, 19 nt, Artificial Sequence
  Description of Artificial Sequence:  siNA antisense region
cgcacacauaguggcccuc

SEQ ID NO: 1860 - RNA, 19 nt, Artificial Sequence
  Description of Artificial Sequence:  siNA antisense region
ugcgccggucuugcacuuc

SEQ ID NO: 1861 - RNA, 19 nt, Artificial Sequence
  Description of Artificial Sequence:  siNA antisense region
ggcagugcuugucauggcu

SEQ ID NO: 1862 - RNA, 19 nt, Artificial Sequence
  Description of Artificial Sequence:  siNA antisense region
ccgacagguacuucuugug

SEQ ID NO: 1863 - RNA, 19 nt, Artificial Sequence
  Description of Artificial Sequence:  siNA antisense region
gggcuuccagggccugcac

SEQ ID NO: 1864 - RNA, 19 nt, Artificial Sequence
  Description of Artificial Sequence:  siNA antisense region
aguucugcgugagccgagg

SEQ ID NO: 1865 - RNA, 19 nt, Artificial Sequence
  Description of Artificial Sequence:  siNA antisense region
ucaccaggaggucggucaa

SEQ ID NO: 1866 - RNA, 19 nt, Artificial Sequence
  Description of Artificial Sequence:  siNA antisense region
ccagcgagucgcucacguu

SEQ ID NO: 1867 - RNA, 19 nt, Artificial Sequence
  Description of Artificial Sequence:  siNA antisense region
ccaccaagcacugcaucuc

SEQ ID NO: 1868 - RNA, 19 nt, Artificial Sequence
  Description of Artificial Sequence:  siNA antisense region
ugggcgcgugcgcuccggc

SEQ ID NO: 1869 - RNA, 19 nt, Artificial Sequence
  Description of Artificial Sequence:  siNA antisense region
cuuuguaccacacgaugcu

SEQ ID NO: 1870 - RNA, 19 nt, Artificial Sequence
  Description of Artificial Sequence:  siNA antisense region
ccuccagcagccucucguc

SEQ ID NO: 1871 - RNA, 19 nt, Artificial Sequence
  Description of Artificial Sequence:  siNA antisense region
agucgacuccagacuuuuc

SEQ ID NO: 1872 - RNA, 19 nt, Artificial Sequence
  Description of Artificial Sequence:  siNA antisense region
ucugguuggaguccgccaa

SEQ ID NO: 1873 - RNA, 19 nt, Artificial Sequence
  Description of Artificial Sequence:  siNA antisense region
cgcgcuggaugcucagcuu

SEQ ID NO: 1874 - RNA, 19 nt, Artificial Sequence
  Description of Artificial Sequence:  siNA antisense region
ccgcauccuccucgcgcac

SEQ ID NO: 1875 - RNA, 19 nt, Artificial Sequence
  Description of Artificial Sequence:  siNA antisense region
cgcugcacagauacggucc

SEQ ID NO: 1876 - RNA, 19 nt, Artificial Sequence
  Description of Artificial Sequence:  siNA antisense region
agcccuugggucugcacac

SEQ ID NO: 1877 - RNA, 19 nt, Artificial Sequence
  Description of Artificial Sequence:  siNA antisense region
uggcggaggaguugacgca

SEQ ID NO: 1878 - RNA, 19 nt, Artificial Sequence
  Description of Artificial Sequence:  siNA antisense region
agccuuccacggccacgcu

SEQ ID NO: 1879 - RNA, 19 nt, Artificial Sequence
  Description of Artificial Sequence:  siNA antisense region
ugcugcccuuauccucgga

SEQ ID NO: 1880 - RNA, 19 nt, Artificial Sequence
  Description of Artificial Sequence:  siNA antisense region
caaggaucacgaucuccau

SEQ ID NO: 1881 - RNA, 19 nt, Artificial Sequence
  Description of Artificial Sequence:  siNA antisense region
cgaugacgccgguaccgac

SEQ ID NO: 1882 - RNA, 19 nt, Artificial Sequence
  Description of Artificial Sequence:  siNA antisense region
ggacccagaagaagacagc

SEQ ID NO: 1883 - RNA, 19 nt, Artificial Sequence
  Description of Artificial Sequence:  siNA antisense region
agaagaugaggaggaggag

SEQ ID NO: 1884 - RNA, 19 nt, Artificial Sequence
  Description of Artificial Sequence:  siNA antisense region
ccggccuccucauguuaca

SEQ ID NO: 1885 - RNA, 19 nt, Artificial Sequence
  Description of Artificial Sequence:  siNA antisense region
ucuugaugucugcgugggc

SEQ ID NO: 1886 - RNA, 19 nt, Artificial Sequence
  Description of Artificial Sequence:  siNA antisense region
ugauggacagguagcccgu

SEQ ID NO: 1887 - RNA, 19 nt, Artificial Sequence
  Description of Artificial Sequence:  siNA antisense region
ccuccccgggguccaugau

SEQ ID NO: 1888 - RNA, 19 nt, Artificial Sequence
  Description of Artificial Sequence:  siNA antisense region
auugcuccuccagaggcac

SEQ ID NO: 1889 - RNA, 19 nt, Artificial Sequence
  Description of Artificial Sequence:  siNA antisense region
cguaggacagguauucgca

SEQ ID NO: 1890 - RNA, 19 nt, Artificial Sequence
  Description of Artificial Sequence:  siNA antisense region
auucccacuggcuggcauc

SEQ ID NO: 1891 - RNA, 19 nt, Artificial Sequence
  Description of Artificial Sequence:  siNA antisense region
gcagccgcucucgggggaa

SEQ ID NO: 1892 - RNA, 19 nt, Artificial Sequence
  Description of Artificial Sequence:  siNA antisense region
cgagcacucuccccaggug

SEQ ID NO: 1893 - RNA, 19 nt, Artificial Sequence
  Description of Artificial Sequence:  siNA antisense region
ucccgaaggcgccguagcc

SEQ ID NO: 1894 - RNA, 19 nt, Artificial Sequence
  Description of Artificial Sequence:  siNA antisense region
cggaggcuuccaccaccuu

SEQ ID NO: 1895 - RNA, 19 nt, Artificial Sequence
  Description of Artificial Sequence:  siNA antisense region
ccuuguggaugccgaaagc

SEQ ID NO: 1896 - RNA, 19 nt, Artificial Sequence
  Description of Artificial Sequence:  siNA antisense region
cggugucacagcugcugcc

SEQ ID NO: 1897 - RNA, 19 nt, Artificial Sequence
  Description of Artificial Sequence:  siNA antisense region
ucagcauuuucacggccac

SEQ ID NO: 1898 - RNA, 19 nt, Artificial Sequence
  Description of Artificial Sequence:  siNA antisense region
uggccguggcgcccucuuu

SEQ ID NO: 1899 - RNA, 19 nt, Artificial Sequence
  Description of Artificial Sequence:  siNA antisense region
ucagcgcgcgcugcucgcu

SEQ ID NO: 1900 - RNA, 19 nt, Artificial Sequence
  Description of Artificial Sequence:  siNA antisense region
ggaucuugagcuccgacau

SEQ ID NO: 1901 - RNA, 19 nt, Artificial Sequence
  Description of Artificial Sequence:  siNA antisense region
gguugccgaugugaaugag

SEQ ID NO: 1902 - RNA, 19 nt, Artificial Sequence
  Description of Artificial Sequence:  siNA antisense region
gguugaccacguugaggug

SEQ ID NO: 1903 - RNA, 19 nt, Artificial Sequence
  Description of Artificial Sequence:  siNA antisense region
uggugcacgccccgaggag

SEQ ID NO: 1904 - RNA, 19 nt, Artificial Sequence
  Description of Artificial Sequence:  siNA antisense region
ugagggggcccugcggcuu

SEQ ID NO: 1905 - RNA, 19 nt, Artificial Sequence
  Description of Artificial Sequence:  siNA antisense region
agaacuccacgaucaccau

SEQ ID NO: 1906 - RNA, 19 nt, Artificial Sequence
  Description of Artificial Sequence:  siNA antisense region
agagguugccguacuugca

SEQ ID NO: 1907 - RNA, 19 nt, Artificial Sequence
  Description of Artificial Sequence:  siNA antisense region
uggcgcgcaggaaguugga

SEQ ID NO: 1908 - RNA, 19 nt, Artificial Sequence
  Description of Artificial Sequence:  siNA antisense region
ggcugaaggcgucccgcuu

SEQ ID NO: 1909 - RNA, 19 nt, Artificial Sequence
  Description of Artificial Sequence:  siNA antisense region
gagacuucuccgcgcaggg

SEQ ID NO: 1910 - RNA, 19 nt, Artificial Sequence
  Description of Artificial Sequence:  siNA antisense region
agcguccgcgcugcucggg

SEQ ID NO: 1911 - RNA, 19 nt, Artificial Sequence
  Description of Artificial Sequence:  siNA antisense region
gcuccaccauggcgcggaa

SEQ ID NO: 1912 - RNA, 19 nt, Artificial Sequence
  Description of Artificial Sequence:  siNA antisense region
uccgauccagccuggcgag

SEQ ID NO: 1913 - RNA, 19 nt, Artificial Sequence
  Description of Artificial Sequence:  siNA antisense region
cgcugcuccccggccgccu

SEQ ID NO: 1914 - RNA, 19 nt, Artificial Sequence
  Description of Artificial Sequence:  siNA antisense region
gcgcgaagaggacccuguc

SEQ ID NO: 1915 - RNA, 19 nt, Artificial Sequence
  Description of Artificial Sequence:  siNA antisense region
ccucggucuucgagaaccg

SEQ ID NO: 1916 - RNA, 19 nt, Artificial Sequence
  Description of Artificial Sequence:  siNA antisense region
aagcccgccucgcuccgcc

SEQ ID NO: 1917 - RNA, 19 nt, Artificial Sequence
  Description of Artificial Sequence:  siNA antisense region
cagcuucuuggucuggaga

SEQ ID NO: 1918 - RNA, 19 nt, Artificial Sequence
  Description of Artificial Sequence:  siNA antisense region
ggcucagccacagguccuc

SEQ ID NO: 1919 - RNA, 19 nt, Artificial Sequence
  Description of Artificial Sequence:  siNA antisense region
gaucuuccauggucagcgg

SEQ ID NO: 1920 - RNA, 19 nt, Artificial Sequence
  Description of Artificial Sequence:  siNA antisense region
ggaagcuguagcagacaag

SEQ ID NO: 1921 - RNA, 19 nt, Artificial Sequence
  Description of Artificial Sequence:  siNA antisense region
ccaucccucuggccaccug

SEQ ID NO: 1922 - RNA, 19 nt, Artificial Sequence
  Description of Artificial Sequence:  siNA antisense region
uucgggaagccaggaacuc

SEQ ID NO: 1923 - RNA, 19 nt, Artificial Sequence
  Description of Artificial Sequence:  siNA antisense region
ggucucuguggaugcacuu

SEQ ID NO: 1924 - RNA, 19 nt, Artificial Sequence
  Description of Artificial Sequence:  siNA antisense region
gaauguuccgagcagccag

SEQ ID NO: 1925 - RNA, 19 nt, Artificial Sequence
  Description of Artificial Sequence:  siNA antisense region
cgucgcuuuccgacagcag

SEQ ID NO: 1926 - RNA, 19 nt, Artificial Sequence
  Description of Artificial Sequence:  siNA antisense region
agucacagaucuucaccac

SEQ ID NO: 1927 - RNA, 19 nt, Artificial Sequence
  Description of Artificial Sequence:  siNA antisense region
ugucccgggcaaggccaaa

SEQ ID NO: 1928 - RNA, 19 nt, Artificial Sequence
  Description of Artificial Sequence:  siNA antisense region
agucggggucuuuguagau

SEQ ID NO: 1929 - RNA, 19 nt, Artificial Sequence
  Description of Artificial Sequence:  siNA antisense region
cacugcccuugcggacgua

SEQ ID NO: 1930 - RNA, 19 nt, Artificial Sequence
  Description of Artificial Sequence:  siNA antisense region
acuucaggggcagccgggc

SEQ ID NO: 1931 - RNA, 19 nt, Artificial Sequence
  Description of Artificial Sequence:  siNA antisense region
ugcuuucaggggccaucca

SEQ ID NO: 1932 - RNA, 19 nt, Artificial Sequence
  Description of Artificial Sequence:  siNA antisense region
uguacaccuugucgaagau

SEQ ID NO: 1933 - RNA, 19 nt, Artificial Sequence
  Description of Artificial Sequence:  siNA antisense region
acacgucacucugcguggu

SEQ ID NO: 1934 - RNA, 19 nt, Artificial Sequence
  Description of Artificial Sequence:  siNA antisense region
gaagcaccccaaaggacca

SEQ ID NO: 1935 - RNA, 19 nt, Artificial Sequence
  Description of Artificial Sequence:  siNA antisense region
gagagaagaucucccagag

SEQ ID NO: 1936 - RNA, 19 nt, Artificial Sequence
  Description of Artificial Sequence:  siNA antisense region
gguacggggaggcccccag

SEQ ID NO: 1937 - RNA, 19 nt, Artificial Sequence
  Description of Artificial Sequence:  siNA antisense region
cauugaucugcaccccagg

SEQ ID NO: 1938 - RNA, 19 nt, Artificial Sequence
  Description of Artificial Sequence:  siNA antisense region
cgcgcuggcagaacuccuc

SEQ ID NO: 1939 - RNA, 19 nt, Artificial Sequence
  Description of Artificial Sequence:  siNA antisense region
uccuugugccgucucucac

SEQ ID NO: 1940 - RNA, 19 nt, Artificial Sequence
  Description of Artificial Sequence:  siNA antisense region
ccagcuccggggcccucau

SEQ ID NO: 1941 - RNA, 19 nt, Artificial Sequence
  Description of Artificial Sequence:  siNA antisense region
ggcguauggcgggaguggc

SEQ ID NO: 1942 - RNA, 19 nt, Artificial Sequence
  Description of Artificial Sequence:  siNA antisense region
agcaguucagcaugaugug

SEQ ID NO: 1943 - RNA, 19 nt, Artificial Sequence
  Description of Artificial Sequence:  siNA antisense region
ccuuggggucuccggacca

SEQ ID NO: 1944 - RNA, 19 nt, Artificial Sequence
  Description of Artificial Sequence:  siNA antisense region
ccgagaaugcaggucucgc

SEQ ID NO: 1945 - RNA, 19 nt, Artificial Sequence
  Description of Artificial Sequence:  siNA antisense region
ccaggaucuccaccagguc

SEQ ID NO: 1946 - RNA, 19 nt, Artificial Sequence
  Description of Artificial Sequence:  siNA antisense region
ugcccuggagcaggucccc

SEQ ID NO: 1947 - RNA, 19 nt, Artificial Sequence
  Description of Artificial Sequence:  siNA antisense region
cuuccucuugcaggccccu

SEQ ID NO: 1948 - RNA, 19 nt, Artificial Sequence
  Description of Artificial Sequence:  siNA antisense region
gggccaugcagaccuccuc

SEQ ID NO: 1949 - RNA, 19 nt, Artificial Sequence
  Description of Artificial Sequence:  siNA antisense region
agcucugagagcugcgcgg

SEQ ID NO: 1950 - RNA, 19 nt, Artificial Sequence
  Description of Artificial Sequence:  siNA antisense region
agaagcugcccucuucuga

SEQ ID NO: 1951 - RNA, 19 nt, Artificial Sequence
  Description of Artificial Sequence:  siNA antisense region
ccaugguggacaccugcga

SEQ ID NO: 1952 - RNA, 19 nt, Artificial Sequence
  Description of Artificial Sequence:  siNA antisense region
ccugggcgauguguagggc

SEQ ID NO: 1953 - RNA, 19 nt, Artificial Sequence
  Description of Artificial Sequence:  siNA antisense region
ggcuguccucagcgucagc

SEQ ID NO: 1954 - RNA, 19 nt, Artificial Sequence
  Description of Artificial Sequence:  siNA antisense region
ggcgcugcaggcuuggcgg

SEQ ID NO: 1955 - RNA, 19 nt, Artificial Sequence
  Description of Artificial Sequence:  siNA antisense region
accuggcggccaggcugug

SEQ ID NO: 1956 - RNA, 19 nt, Artificial Sequence
  Description of Artificial Sequence:  siNA antisense region
aggacacccaguuguaaua

SEQ ID NO: 1957 - RNA, 19 nt, Artificial Sequence
  Description of Artificial Sequence:  siNA antisense region
uggccaggcacccgggaaa

SEQ ID NO: 1958 - RNA, 19 nt, Artificial Sequence
  Description of Artificial Sequence:  siNA antisense region
cacgggucucagccccucu

SEQ ID NO: 1959 - RNA, 19 nt, Artificial Sequence
  Description of Artificial Sequence:  siNA antisense region
ucuucauccuggaggaacc

SEQ ID NO: 1960 - RNA, 19 nt, Artificial Sequence
  Description of Artificial Sequence:  siNA antisense region
uggggaauuccucaaaugu

SEQ ID NO: 1961 - RNA, 19 nt, Artificial Sequence
  Description of Artificial Sequence:  siNA antisense region
uguaggucguuggggucau

SEQ ID NO: 1962 - RNA, 19 nt, Artificial Sequence
  Description of Artificial Sequence:  siNA antisense region
gguuguccacagagccuuu

SEQ ID NO: 1963 - RNA, 19 nt, Artificial Sequence
  Description of Artificial Sequence:  siNA antisense region
ccaucccacugucugucug

SEQ ID NO: 1964 - RNA, 19 nt, Artificial Sequence
  Description of Artificial Sequence:  siNA antisense region
acuccuccgaggccagcac

SEQ ID NO: 1965 - RNA, 19 nt, Artificial Sequence
  Description of Artificial Sequence:  siNA antisense region
ugcucucuaucugcucaaa

SEQ ID NO: 1966 - RNA, 19 nt, Artificial Sequence
  Description of Artificial Sequence:  siNA antisense region
cgcuuucuugucuaugccu

SEQ ID NO: 1967 - RNA, 19 nt, Artificial Sequence
  Description of Artificial Sequence:  siNA antisense region
gcuucagcuaccugaagcc

SEQ ID NO: 1968 - RNA, 19 nt, Artificial Sequence
  Description of Artificial Sequence:  siNA antisense region
gcugccuucucucucucug

SEQ ID NO: 1969 - RNA, 19 nt, Artificial Sequence
  Description of Artificial Sequence:  siNA antisense region
aagaaaaugcugacguaug

SEQ ID NO: 1970 - RNA, 19 nt, Artificial Sequence
  Description of Artificial Sequence:  siNA antisense region
uuucuuauaagugcagaga

SEQ ID NO: 1971 - RNA, 19 nt, Artificial Sequence
  Description of Artificial Sequence:  siNA antisense region
gucuuaaagucuuugaucu

SEQ ID NO: 1972 - RNA, 19 nt, Artificial Sequence
  Description of Artificial Sequence:  siNA antisense region
guagaagaaauagcgaaag

SEQ ID NO: 1973 - RNA, 19 nt, Artificial Sequence
  Description of Artificial Sequence:  siNA antisense region
aguuuguaguagauagcag

SEQ ID NO: 1974 - RNA, 19 nt, Artificial Sequence
  Description of Artificial Sequence:  siNA antisense region
cuccugguuccucuuugaa

SEQ ID NO: 1975 - RNA, 19 nt, Artificial Sequence
  Description of Artificial Sequence:  siNA antisense region
uuucaugcuccucuugucc

SEQ ID NO: 1976 - RNA, 19 nt, Artificial Sequence
  Description of Artificial Sequence:  siNA antisense region
gucacacuccuuguccacu

SEQ ID NO: 1977 - RNA, 19 nt, Artificial Sequence
  Description of Artificial Sequence:  siNA antisense region
cccuguggugcuucagugg

SEQ ID NO: 1978 - RNA, 19 nt, Artificial Sequence
  Description of Artificial Sequence:  siNA antisense region
uccggaggccuaaccccuc

SEQ ID NO: 1979 - RNA, 19 nt, Artificial Sequence
  Description of Artificial Sequence:  siNA antisense region
caggccugcccgcagucau

SEQ ID NO: 1980 - RNA, 19 nt, Artificial Sequence
  Description of Artificial Sequence:  siNA antisense region
gggaggcuggauauuaucc

SEQ ID NO: 1981 - RNA, 19 nt, Artificial Sequence
  Description of Artificial Sequence:  siNA antisense region
gcuccaccagcuucuugug

SEQ ID NO: 1982 - RNA, 19 nt, Artificial Sequence
  Description of Artificial Sequence:  siNA antisense region
ggagucagggaacacucug

SEQ ID NO: 1983 - RNA, 19 nt, Artificial Sequence
  Description of Artificial Sequence:  siNA antisense region
cgucucccuuuccuuggag

SEQ ID NO: 1984 - RNA, 19 nt, Artificial Sequence
  Description of Artificial Sequence:  siNA antisense region
cagcagaccaugaaagggc

SEQ ID NO: 1985 - RNA, 19 nt, Artificial Sequence
  Description of Artificial Sequence:  siNA antisense region
gggaaggcaccuguuacuc

SEQ ID NO: 1986 - RNA, 19 nt, Artificial Sequence
  Description of Artificial Sequence:  siNA antisense region
gcaguaacgccagugucug

SEQ ID NO: 1987 - RNA, 19 nt, Artificial Sequence
  Description of Artificial Sequence:  siNA antisense region
ugagggcucuuuggucaag

SEQ ID NO: 1988 - RNA, 19 nt, Artificial Sequence
  Description of Artificial Sequence:  siNA antisense region
gcuggcauaagggccgcuu

SEQ ID NO: 1989 - RNA, 19 nt, Artificial Sequence
  Description of Artificial Sequence:  siNA antisense region
aggugagcccucugucacg

SEQ ID NO: 1990 - RNA, 19 nt, Artificial Sequence
  Description of Artificial Sequence:  siNA antisense region
agugaccuagaaggcaaga

SEQ ID NO: 1991 - RNA, 19 nt, Artificial Sequence
  Description of Artificial Sequence:  siNA antisense region
ugaagggacauugugagaa

SEQ ID NO: 1992 - RNA, 19 nt, Artificial Sequence
  Description of Artificial Sequence:  siNA antisense region
gggcacagggucaggugcu

SEQ ID NO: 1993 - RNA, 19 nt, Artificial Sequence
  Description of Artificial Sequence:  siNA antisense region
uaccaaggaauaaucggcg

SEQ ID NO: 1994 - RNA, 19 nt, Artificial Sequence
  Description of Artificial Sequence:  siNA antisense region
uugauguauuacucauauu

SEQ ID NO: 1995 - RNA, 19 nt, Artificial Sequence
  Description of Artificial Sequence:  siNA antisense region
agcuuuuaauacuacucuu

SEQ ID NO: 1996 - RNA, 19 nt, Artificial Sequence
  Description of Artificial Sequence:  siNA antisense region
uuauaaacaugauuaauua

SEQ ID NO: 1997 - RNA, 23 nt, Artificial Sequence
  Description of Artificial Sequence:  Target Sequence/siNA sense region
gcugucugcuucucacaggaucu

SEQ ID NO: 1998 - RNA, 23 nt, Artificial Sequence
  Description of Artificial Sequence:  Target Sequence/siNA sense region
gaaggagaggaccugaaacuguc

SEQ ID NO: 1999 - RNA, 23 nt, Artificial Sequence
  Description of Artificial Sequence:  Target Sequence/siNA sense region
aaggagaggaccugaaacugucu

SEQ ID NO: 2000 - RNA, 23 nt, Artificial Sequence
  Description of Artificial Sequence:  Target Sequence/siNA sense region
gcauuuggcauuaagaaaucacc

SEQ ID NO: 2001 - RNA, 23 nt, Artificial Sequence
  Description of Artificial Sequence:  Target Sequence/siNA sense region
ugaccuuggagcaucucaucugu

SEQ ID NO: 2002 - RNA, 23 nt, Artificial Sequence
  Description of Artificial Sequence:  Target Sequence/siNA sense region
uuugagcauggaagaggauucug

SEQ ID NO: 2003 - RNA, 23 nt, Artificial Sequence
  Description of Artificial Sequence:  Target Sequence/siNA sense region
ucaccuguuuccuguauggagga

SEQ ID NO: 2004 - RNA, 23 nt, Artificial Sequence
  Description of Artificial Sequence:  Target Sequence/siNA sense region
gacaacacagcaggaaucaguca

SEQ ID NO: 2005 - RNA, 23 nt, Artificial Sequence
  Description of Artificial Sequence:  Target Sequence/siNA sense region
agcacugccacaagaaguaccug

SEQ ID NO: 2006 - RNA, 23 nt, Artificial Sequence
  Description of Artificial Sequence:  Target Sequence/siNA sense region
cugaagcagagagagagaaggca

SEQ ID NO: 2007 - RNA, 23 nt, Artificial Sequence
  Description of Artificial Sequence:  Target Sequence/siNA sense region
aaagaggaaccaggaggacaaga

SEQ ID NO: 2008 - RNA, 23 nt, Artificial Sequence
  Description of Artificial Sequence:  Target Sequence/siNA sense region
gacaagaggagcaugaaagugga

SEQ ID NO: 2009 - RNA, 23 nt, Artificial Sequence
  Description of Artificial Sequence:  Target Sequence/siNA sense region
aacugaguuuaaaaggcacccag

SEQ ID NO: 2010 - RNA, 23 nt, Artificial Sequence
  Description of Artificial Sequence:  Target Sequence/siNA sense region
aacaaccacaaaauacaacaaga

SEQ ID NO: 2011 - RNA, 23 nt, Artificial Sequence
  Description of Artificial Sequence:  Target Sequence/siNA sense region
agccuggaaagaaucaaaaccuu

SEQ ID NO: 2012 - RNA, 23 nt, Artificial Sequence
  Description of Artificial Sequence:  Target Sequence/siNA sense region
aagcaaggagggccucugauggu

SEQ ID NO: 2013 - RNA, 23 nt, Artificial Sequence
  Description of Artificial Sequence:  Target Sequence/siNA sense region
ucguguaaggaguggaccaucau

SEQ ID NO: 2014 - RNA, 23 nt, Artificial Sequence
  Description of Artificial Sequence:  Target Sequence/siNA sense region
uuacggaguauugcugugggaaa

SEQ ID NO: 2015 - RNA, 23 nt, Artificial Sequence
  Description of Artificial Sequence:  Target Sequence/siNA sense region
uagcaggccuaagacaugugagg

SEQ ID NO: 2016 - RNA, 23 nt, Artificial Sequence
  Description of Artificial Sequence:  Target Sequence/siNA sense region
agcaaaaagcaagggagaaaaga

SEQ ID NO: 2017 - RNA, 23 nt, Artificial Sequence
  Description of Artificial Sequence:  Target Sequence/siNA sense region
uguccacuuaccugaggagcaag

SEQ ID NO: 2018 - RNA, 23 nt, Artificial Sequence
  Description of Artificial Sequence:  Target Sequence/siNA sense region
augguucuugccucagaagagcu

SEQ ID NO: 2019 - RNA, 23 nt, Artificial Sequence
  Description of Artificial Sequence:  Target Sequence/siNA sense region
ucugaaggcucaaaccagacaag

SEQ ID NO: 2020 - RNA, 21 nt, Artificial Sequence
  Description of Artificial Sequence:  siNA sense region
  misc_feature (20)..(21): n stands for thymidine
ugucugcuucucacaggaunn

SEQ ID NO: 2021 - RNA, 21 nt, Artificial Sequence
  Description of Artificial Sequence:  siNA sense region
  misc_feature (20)..(21): n stands for thymidine
aggagaggaccugaaacugnn

SEQ ID NO: 2022 - RNA, 21 nt, Artificial Sequence
  Description of Artificial Sequence:  siNA sense region
  misc_feature (20)..(21): n stands for thymidine
ggagaggaccugaaacugunn

SEQ ID NO: 2023 - RNA, 21 nt, Artificial Sequence
  Description of Artificial Sequence:  siNA sense region
  misc_feature (20)..(21): n stands for thymidine
auuuggcauuaagaaaucann

SEQ ID NO: 2024 - RNA, 21 nt, Artificial Sequence
  Description of Artificial Sequence:  siNA antisense region
  misc_feature (20)..(21): n stands for thymidine
auccugugagaagcagacann

SEQ ID NO: 2025 - RNA, 21 nt, Artificial Sequence
  Description of Artificial Sequence:  siNA antisense region
  misc_feature (20)..(21): n stands for thymidine
caguuucagguccucuccunn

SEQ ID NO: 2026 - RNA, 21 nt, Artificial Sequence
  Description of Artificial Sequence:  siNA antisense region
  misc_feature (20)..(21): n stands for thymidine
acaguuucagguccucuccnn

SEQ ID NO: 2027 - RNA, 21 nt, Artificial Sequence
  Description of Artificial Sequence:  siNA antisense region
  misc_feature (20)..(21): n stands for thymidine
ugauuucuuaaugccaaaunn

SEQ ID NO: 2028 - RNA, 21 nt, Artificial Sequence
  Description of Artificial Sequence:  siNA sense region
  misc_feature (1)..(1): 2'-deoxy-2'-fluoro
  misc_feature (1)..(1): 5'-3 attached terminal deoxyabasic moeity
  misc_feature (3)..(5): 2'-deoxy-2'-fluoro
  misc_feature (7)..(12): 2'-deoxy-2'-fluoro
  misc_feature (14)..(14): 2'-deoxy-2'-fluoro
  misc_feature (19)..(19): 2'-deoxy-2'-fluoro
  misc_feature (20)..(21): n stands for thymidine
  misc_feature (21)..(21): 3'-3 attached terminal deoxyabasic moeity
ugucugcuucucacaggaunn

SEQ ID NO: 2029 - RNA, 21 nt, Artificial Sequence
  Description of Artificial Sequence:  siNA sense region
  misc_feature (1)..(1): 5'-3 attached terminal deoxyabasic moeity
  misc_feature (10)..(12): 2'-deoxy-2'-fluoro
  misc_feature (17)..(18): 2'-deoxy-2'-fluoro
  misc_feature (20)..(21): n stands for thymidine
  misc_feature (21)..(21): 3'-3 attached terminal deoxyabasic moeity
aggagaggaccugaaacugnn

SEQ ID NO: 2030 - RNA, 21 nt, Artificial Sequence
  Description of Artificial Sequence:  siNA sense region
  misc_feature (1)..(1): 5'-3 attached terminal deoxyabasic moeity
  misc_feature (9)..(11): 2'-deoxy-2'-fluoro
  misc_feature (16)..(17): 2'-deoxy-2'-fluoro
  misc_feature (19)..(19): 2'-deoxy-2'-fluoro
  misc_feature (20)..(21): n stands for thymidine
  misc_feature (21)..(21): 3'-3 attached terminal deoxyabasic moeity
ggagaggaccugaaacugunn

SEQ ID NO: 2031 - RNA, 21 nt, Artificial Sequence
  Description of Artificial Sequence:  siNA sense region
  misc_feature (1)..(1): 5'-3 attached terminal deoxyabasic moeity
  misc_feature (2)..(4): 2'-deoxy-2'-fluoro
  misc_feature (7)..(7): 2'-deoxy-2'-fluoro
  misc_feature (9)..(10): 2'-deoxy-2'-fluoro
  misc_feature (17)..(18): 2'-deoxy-2'-fluoro
  misc_feature (20)..(21): n stands for thymidine
  misc_feature (21)..(21): 3'-3 attached terminal deoxyabasic moeity
auuuggcauuaagaaaucann

SEQ ID NO: 2032 - RNA, 21 nt, Artificial Sequence
  Description of Artificial Sequence:  siNA antisense region
  misc_feature (2)..(5): 2'-deoxy-2'-fluoro
  misc_feature (7)..(7): 2'-deoxy-2'-fluoro
  misc_feature (14)..(14): 2'-deoxy-2'-fluoro
  misc_feature (18)..(18): 2'-deoxy-2'-fluoro
  misc_feature (20)..(21): n stands for thymidine
  misc_feature (20)..(20): Phosphorothioate 3'-Internucleotide Linkage
auccugugagaagcagacann

SEQ ID NO: 2033 - RNA, 21 nt, Artificial Sequence
  Description of Artificial Sequence:  siNA antisense region
  misc_feature (1)..(1): 2'-deoxy-2'-fluoro
  misc_feature (4)..(7): 2'-deoxy-2'-fluoro
  misc_feature (11)..(19): 2'-deoxy-2'-fluoro
  misc_feature (20)..(21): n stands for thymidine
  misc_feature (20)..(20): Phosphorothioate 3'-Internucleotide Linkage
caguuucagguccucuccunn

SEQ ID NO: 2034 - RNA, 21 nt, Artificial Sequence
  Description of Artificial Sequence:  siNA antisense region
  misc_feature (2)..(2): 2'-deoxy-2'-fluoro
  misc_feature (5)..(8): 2'-deoxy-2'-fluoro
  misc_feature (12)..(19): 2'-deoxy-2'-fluoro
  misc_feature (20)..(21): n stands for thymidine
  misc_feature (20)..(20): Phosphorothioate 3'-Internucleotide Linkage
acaguuucagguccucuccnn

SEQ ID NO: 2035 - RNA, 21 nt, Artificial Sequence
  Description of Artificial Sequence:  siNA antisense region
  misc_feature (1)..(1): 2'-deoxy-2'-fluoro
  misc_feature (4)..(9): 2'-deoxy-2'-fluoro
  misc_feature (12)..(12): 2'-deoxy-2'-fluoro
  misc_feature (14)..(15): 2'-deoxy-2'-fluoro
  misc_feature (19)..(19): 2'-deoxy-2'-fluoro
  misc_feature (20)..(21): n stands for thymidine
  misc_feature (20)..(20): Phosphorothioate 3'-Internucleotide Linkage
ugauuucuuaaugccaaaunn

SEQ ID NO: 2036 - RNA, 21 nt, Artificial Sequence
  Description of Artificial Sequence:  siNA sense region
  misc_feature (1)..(1): 2'-deoxy-2'-fluoro
  misc_feature (1)..(1): 5'-3 attached terminal deoxyabasic moeity
  misc_feature (2)..(2): 2'-deoxy
  misc_feature (3)..(5): 2'-deoxy-2'-fluoro
  misc_feature (6)..(6): 2'-deoxy
  misc_feature (7)..(12): 2'-deoxy-2'-fluoro
  misc_feature (13)..(13): 2'-deoxy
  misc_feature (14)..(14): 2'-deoxy-2'-fluoro
  misc_feature (15)..(18): 2'-deoxy
  misc_feature (19)..(19): 2'-deoxy-2'-fluoro
  misc_feature (20)..(21): n stands for thymidine
  misc_feature (21)..(21): 3'-3 attached terminal deoxyabasic moeity
ugucugcuucucacaggaunn

SEQ ID NO: 2037 - RNA, 21 nt, Artificial Sequence
  Description of Artificial Sequence:  siNA sense region
  misc_feature (1)..(9): 2'-deoxy
  misc_feature (1)..(1): 5'-3 attached terminal deoxyabasic moeity
  misc_feature (10)..(12): 2'-deoxy-2'-fluoro
  misc_feature (13)..(16): 2'-deoxy
  misc_feature (17)..(18): 2'-deoxy-2'-fluoro
  misc_feature (19)..(19): 2'-deoxy
  misc_feature (20)..(21): n stands for thymidine
  misc_feature (21)..(21): 3'-3 attached terminal deoxyabasic moeity
aggagaggaccugaaacugnn

SEQ ID NO: 2038 - RNA, 21 nt, Artificial Sequence
  Description of Artificial Sequence:  siNA sense region
  misc_feature (1)..(8): 2'-deoxy
  misc_feature (1)..(1): 5'-3 attached terminal deoxyabasic moeity
  misc_feature (9)..(11): 2'-deoxy-2'-fluoro
  misc_feature (12)..(15): 2'-deoxy
  misc_feature (16)..(17): 2'-deoxy-2'-fluoro
  misc_feature (18)..(18): 2'-deoxy
  misc_feature (19)..(19): 2'-deoxy-2'-fluoro
  misc_feature (20)..(21): n stands for thymidine
  misc_feature (21)..(21): 3'-3 attached terminal deoxyabasic moeity
ggagaggaccugaaacugunn

SEQ ID NO: 2039 - RNA, 21 nt, Artificial Sequence
  Description of Artificial Sequence:  siNA sense region
  misc_feature (1)..(1): 2'-deoxy
  misc_feature (1)..(1): 5'-3 attached terminal deoxyabasic moeity
  misc_feature (2)..(4): 2'-deoxy-2'-fluoro
  misc_feature (5)..(6): 2'-deoxy
  misc_feature (7)..(7): 2'-deoxy-2'-fluoro
  misc_feature (8)..(8): 2'-deoxy
  misc_feature (9)..(10): 2'-deoxy-2'-fluoro
  misc_feature (11)..(16): 2'-deoxy
  misc_feature (17)..(18): 2'-deoxy-2'-fluoro
  misc_feature (19)..(19): 2'-deoxy
  misc_feature (20)..(21): n stands for thymidine
  misc_feature (21)..(21): 3'-3 attached terminal deoxyabasic moeity
auuuggcauuaagaaaucann

SEQ ID NO: 2040 - RNA, 21 nt, Artificial Sequence
  Description of Artificial Sequence:  siNA antisense region
  misc_feature (1)..(1): 2'-deoxy
  misc_feature (2)..(5): 2'-deoxy-2'-fluoro
  misc_feature (6)..(6): 2'-deoxy
  misc_feature (7)..(7): 2'-deoxy-2'-fluoro
  misc_feature (8)..(13): 2'-deoxy
  misc_feature (14)..(14): 2'-deoxy-2'-fluoro
  misc_feature (15)..(17): 2'-deoxy
  misc_feature (18)..(18): 2'-deoxy-2'-fluoro
  misc_feature (19)..(19): 2'-deoxy
  misc_feature (20)..(21): n stands for thymidine
  misc_feature (20)..(20): Phosphorothioate 3'-Internucleotide Linkage
auccugugagaagcagacann

SEQ ID NO: 2041 - RNA, 21 nt, Artificial Sequence
  Description of Artificial Sequence:  siNA antisense region
  misc_feature (1)..(1): 2'-deoxy-2'-fluoro
  misc_feature (2)..(3): 2'-deoxy
  misc_feature (4)..(7): 2'-deoxy-2'-fluoro
  misc_feature (8)..(10): 2'-deoxy
  misc_feature (11)..(19): 2'-deoxy-2'-fluoro
  misc_feature (20)..(21): n stands for thymidine
  misc_feature (20)..(20): Phosphorothioate 3'-Internucleotide Linkage
caguuucagguccucuccunn

SEQ ID NO: 2042 - RNA, 21 nt, Artificial Sequence
  Description of Artificial Sequence:  siNA antisense region
  misc_feature (1)..(1): 2'-deoxy
  misc_feature (2)..(2): 2'-deoxy-2'-fluoro
  misc_feature (3)..(4): 2'-deoxy
  misc_feature (5)..(8): 2'-deoxy-2'-fluoro
  misc_feature (9)..(11): 2'-deoxy
  misc_feature (12)..(19): 2'-deoxy-2'-fluoro
  misc_feature (20)..(21): n stands for thymidine
  misc_feature (20)..(20): Phosphorothioate 3'-Internucleotide Linkage
acaguuucagguccucuccnn

SEQ ID NO: 2043 - RNA, 21 nt, Artificial Sequence
  Description of Artificial Sequence:  siNA antisense region
  misc_feature (1)..(1): 2'-deoxy-2'-fluoro
  misc_feature (2)..(3): 2'-deoxy
  misc_feature (4)..(9): 2'-deoxy-2'-fluoro
  misc_feature (10)..(11): 2'-deoxy
  misc_feature (12)..(12): 2'-deoxy-2'-fluoro
  misc_feature (13)..(13): 2'-deoxy
  misc_feature (14)..(15): 2'-deoxy-2'-fluoro
  misc_feature (16)..(18): 2'-deoxy
  misc_feature (19)..(19): 2'-deoxy-2'-fluoro
  misc_feature (20)..(21): n stands for thymidine
  misc_feature (20)..(20): Phosphorothioate 3'-Internucleotide Linkage
ugauuucuuaaugccaaaunn

SEQ ID NO: 2044 - RNA, 21 nt, Artificial Sequence
  Description of Artificial Sequence:  siNA sense region
  misc_feature (20)..(21): n stands for thymidine
accuuggagcaucucaucunn

SEQ ID NO: 2045 - RNA, 21 nt, Artificial Sequence
  Description of Artificial Sequence:  siNA sense region
  misc_feature (20)..(21): n stands for thymidine
ugagcauggaagaggauucnn

SEQ ID NO: 2046 - RNA, 21 nt, Artificial Sequence
  Description of Artificial Sequence:  siNA sense region
  misc_feature (20)..(21): n stands for thymidine
accuguuuccuguauggagnn

SEQ ID NO: 2047 - RNA, 21 nt, Artificial Sequence
  Description of Artificial Sequence:  siNA sense region
  misc_feature (20)..(21): n stands for thymidine
caacacagcaggaaucagunn

SEQ ID NO: 2048 - RNA, 21 nt, Artificial Sequence
  Description of Artificial Sequence:  siNA antisense region
  misc_feature (20)..(21): n stands for thymidine
agaugagaugcuccaaggunn

SEQ ID NO: 2049 - RNA, 21 nt, Artificial Sequence
  Description of Artificial Sequence:  siNA antisense region
  misc_feature (20)..(21): n stands for thymidine
gaauccucuuccaugcucann

SEQ ID NO: 2050 - RNA, 21 nt, Artificial Sequence
  Description of Artificial Sequence:  siNA antisense region
  misc_feature (20)..(21): n stands for thymidine
cuccauacaggaaacaggunn

SEQ ID NO: 2051 - RNA, 21 nt, Artificial Sequence
  Description of Artificial Sequence:  siNA antisense region
  misc_feature (20)..(21): n stands for thymidine
acugauuccugcuguguugnn

SEQ ID NO: 2052 - RNA, 21 nt, Artificial Sequence
  Description of Artificial Sequence:  siNA sense region
  misc_feature (1)..(1): 5'-3 attached terminal deoxyabasic moeity
  misc_feature (2)..(5): 2'-deoxy-2'-fluoro
  misc_feature (10)..(10): 2'-deoxy-2'-fluoro
  misc_feature (12)..(15): 2'-deoxy-2'-fluoro
  misc_feature (17)..(19): 2'-deoxy-2'-fluoro
  misc_feature (20)..(21): n stands for thymidine
  misc_feature (21)..(21): 3'-3 attached terminal deoxyabasic moeity
accuuggagcaucucaucunn

SEQ ID NO: 2053 - RNA, 21 nt, Artificial Sequence
  Description of Artificial Sequence:  siNA sense region
  misc_feature (1)..(1): 2'-deoxy-2'-fluoro
  misc_feature (1)..(1): 5'-3 attached terminal deoxyabasic moeity
  misc_feature (5)..(5): 2'-deoxy-2'-fluoro
  misc_feature (7)..(7): 2'-deoxy-2'-fluoro
  misc_feature (17)..(19): 2'-deoxy-2'-fluoro
  misc_feature (20)..(21): n stands for thymidine
  misc_feature (21)..(21): 3'-3 attached terminal deoxyabasic moeity
ugagcauggaagaggauucnn

SEQ ID NO: 2054 - RNA, 21 nt, Artificial Sequence
  Description of Artificial Sequence:  siNA sense region
  misc_feature (1)..(1): 5'-3 attached terminal deoxyabasic moeity
  misc_feature (2)..(4): 2'-deoxy-2'-fluoro
  misc_feature (6)..(11): 2'-deoxy-2'-fluoro
  misc_feature (13)..(13): 2'-deoxy-2'-fluoro
  misc_feature (15)..(15): 2'-deoxy-2'-fluoro
  misc_feature (20)..(21): n stands for thymidine
  misc_feature (21)..(21): 3'-3 attached terminal deoxyabasic moeity
accuguuuccuguauggagnn

SEQ ID NO: 2055 - RNA, 21 nt, Artificial Sequence
  Description of Artificial Sequence:  siNA sense region
  misc_feature (1)..(1): 2'-deoxy-2'-fluoro
  misc_feature (1)..(1): 5'-3 attached terminal deoxyabasic moeity
  misc_feature (4)..(4): 2'-deoxy-2'-fluoro
  misc_feature (6)..(6): 2'-deoxy-2'-fluoro
  misc_feature (9)..(9): 2'-deoxy-2'-fluoro
  misc_feature (15)..(16): 2'-deoxy-2'-fluoro
  misc_feature (19)..(19): 2'-deoxy-2'-fluoro
  misc_feature (20)..(21): n stands for thymidine
  misc_feature (21)..(21): 3'-3 attached terminal deoxyabasic moeity
caacacagcaggaaucagunn

SEQ ID NO: 2056 - RNA, 21 nt, Artificial Sequence
  Description of Artificial Sequence:  siNA antisense region
  misc_feature (4)..(4): 2'-deoxy-2'-fluoro
  misc_feature (9)..(9): 2'-deoxy-2'-fluoro
  misc_feature (11)..(14): 2'-deoxy-2'-fluoro
  misc_feature (19)..(19): 2'-deoxy-2'-fluoro
  misc_feature (20)..(21): n stands for thymidine
  misc_feature (20)..(20): Phosphorothioate 3'-Internucleotide Linkage
agaugagaugcuccaaggunn

SEQ ID NO: 2057 - RNA, 21 nt, Artificial Sequence
  Description of Artificial Sequence:  siNA antisense region
  misc_feature (4)..(12): 2'-deoxy-2'-fluoro
  misc_feature (14)..(14): 2'-deoxy-2'-fluoro
  misc_feature (16)..(18): 2'-deoxy-2'-fluoro
  misc_feature (20)..(21): n stands for thymidine
  misc_feature (20)..(20): Phosphorothioate 3'-Internucleotide Linkage
gaauccucuuccaugcucann

SEQ ID NO: 2058 - RNA, 21 nt, Artificial Sequence
  Description of Artificial Sequence:  siNA antisense region
  misc_feature (1)..(4): 2'-deoxy-2'-fluoro
  misc_feature (6)..(6): 2'-deoxy-2'-fluoro
  misc_feature (8)..(8): 2'-deoxy-2'-fluoro
  misc_feature (15)..(15): 2'-deoxy-2'-fluoro
  misc_feature (19)..(19): 2'-deoxy-2'-fluoro
  misc_feature (20)..(21): n stands for thymidine
  misc_feature (20)..(20): Phosphorothioate 3'-Internucleotide Linkage
cuccauacaggaaacaggunn

SEQ ID NO: 2059 - RNA, 21 nt, Artificial Sequence
  Description of Artificial Sequence:  siNA antisense region
  misc_feature (2)..(3): 2'-deoxy-2'-fluoro
  misc_feature (6)..(10): 2'-deoxy-2'-fluoro
  misc_feature (12)..(13): 2'-deoxy-2'-fluoro
  misc_feature (15)..(15): 2'-deoxy-2'-fluoro
  misc_feature (17)..(18): 2'-deoxy-2'-fluoro
  misc_feature (20)..(21): n stands for thymidine
  misc_feature (20)..(20): Phosphorothioate 3'-Internucleotide Linkage
acugauuccugcuguguugnn

SEQ ID NO: 2060 - RNA, 21 nt, Artificial Sequence
  Description of Artificial Sequence:  siNA sense region
  misc_feature (1)..(1): 2'-deoxy
  misc_feature (1)..(1): 5'-3 attached terminal deoxyabasic moeity
  misc_feature (2)..(5): 2'-deoxy-2'-fluoro
  misc_feature (6)..(9): 2'-deoxy
  misc_feature (10)..(10): 2'-deoxy-2'-fluoro
  misc_feature (11)..(11): 2'-deoxy
  misc_feature (12)..(15): 2'-deoxy-2'-fluoro
  misc_feature (16)..(16): 2'-deoxy
  misc_feature (17)..(19): 2'-deoxy-2'-fluoro
  misc_feature (20)..(21): n stands for thymidine
  misc_feature (21)..(21): 3'-3 attached terminal deoxyabasic moeity
accuuggagcaucucaucunn

SEQ ID NO: 2061 - RNA, 21 nt, Artificial Sequence
  Description of Artificial Sequence:  siNA sense region
  misc_feature (1)..(1): 2'-deoxy-2'-fluoro
  misc_feature (1)..(1): 5'-3 attached terminal deoxyabasic moeity
  misc_feature (2)..(4): 2'-deoxy
  misc_feature (5)..(5): 2'-deoxy-2'-fluoro
  misc_feature (6)..(6): 2'-deoxy
  misc_feature (7)..(7): 2'-deoxy-2'-fluoro
  misc_feature (8)..(16): 2'-deoxy
  misc_feature (17)..(19): 2'-deoxy-2'-fluoro
  misc_feature (20)..(21): n stands for thymidine
  misc_feature (21)..(21): 3'-3 attached terminal deoxyabasic moeity
ugagcauggaagaggauucnn

SEQ ID NO: 2062 - RNA, 21 nt, Artificial Sequence
  Description of Artificial Sequence:  siNA sense region
  misc_feature (1)..(1): 2'-deoxy
  misc_feature (1)..(1): 5'-3 attached terminal deoxyabasic moeity
  misc_feature (2)..(4): 2'-deoxy-2'-fluoro
  misc_feature (5)..(5): 2'-deoxy
  misc_feature (6)..(11): 2'-deoxy-2'-fluoro
  misc_feature (12)..(12): 2'-deoxy
  misc_feature (13)..(13): 2'-deoxy-2'-fluoro
  misc_feature (14)..(14): 2'-deoxy
  misc_feature (15)..(15): 2'-deoxy-2'-fluoro
  misc_feature (16)..(19): 2'-deoxy
  misc_feature (20)..(21): n stands for thymidine
  misc_feature (21)..(21): 3'-3 attached terminal deoxyabasic moeity
accuguuuccuguauggagnn

SEQ ID NO: 2063 - RNA, 21 nt, Artificial Sequence
  Description of Artificial Sequence:  siNA sense region
  misc_feature (1)..(1): 2'-deoxy-2'-fluoro
  misc_feature (1)..(1): 5'-3 attached terminal deoxyabasic moeity
  misc_feature (2)..(3): 2'-deoxy
  misc_feature (4)..(4): 2'-deoxy-2'-fluoro
  misc_feature (5)..(5): 2'-deoxy
  misc_feature (6)..(6): 2'-deoxy-2'-fluoro
  misc_feature (7)..(8): 2'-deoxy
  misc_feature (9)..(9): 2'-deoxy-2'-fluoro
  misc_feature (10)..(14): 2'-deoxy
  misc_feature (15)..(16): 2'-deoxy-2'-fluoro
  misc_feature (17)..(18): 2'-deoxy
  misc_feature (19)..(19): 2'-deoxy-2'-fluoro
  misc_feature (20)..(21): n stands for thymidine
  misc_feature (21)..(21): 3'-3 attached terminal deoxyabasic moeity
caacacagcaggaaucagunn

SEQ ID NO: 2064 - RNA, 21 nt, Artificial Sequence
  Description of Artificial Sequence:  siNA antisense region
  misc_feature (1)..(3): 2'-deoxy
  misc_feature (4)..(4): 2'-deoxy-2'-fluoro
  misc_feature (5)..(8): 2'-deoxy
  misc_feature (9)..(9): 2'-deoxy-2'-fluoro
  misc_feature (10)..(10): 2'-deoxy
  misc_feature (11)..(14): 2'-deoxy-2'-fluoro
  misc_feature (15)..(18): 2'-deoxy
  misc_feature (19)..(19): 2'-deoxy-2'-fluoro
  misc_feature (20)..(21): n stands for thymidine
  misc_feature (20)..(20): Phosphorothioate 3'-Internucleotide Linkage
agaugagaugcuccaaggunn

SEQ ID NO: 2065 - RNA, 21 nt, Artificial Sequence
  Description of Artificial Sequence:  siNA antisense region
  misc_feature (1)..(3): 2'-deoxy
  misc_feature (4)..(12): 2'-deoxy-2'-fluoro
  misc_feature (13)..(13): 2'-deoxy
  misc_feature (14)..(14): 2'-deoxy-2'-fluoro
  misc_feature (15)..(15): 2'-deoxy
  misc_feature (16)..(18): 2'-deoxy-2'-fluoro
  misc_feature (19)..(19): 2'-deoxy
  misc_feature (20)..(21): n stands for thymidine
  misc_feature (20)..(20): Phosphorothioate 3'-Internucleotide Linkage
gaauccucuuccaugcucann

SEQ ID NO: 2066 - RNA, 21 nt, Artificial Sequence
  Description of Artificial Sequence:  siNA antisense region
  misc_feature (1)..(4): 2'-deoxy-2'-fluoro
  misc_feature (5)..(5): 2'-deoxy
  misc_feature (6)..(6): 2'-deoxy-2'-fluoro
  misc_feature (7)..(7): 2'-deoxy
  misc_feature (8)..(8): 2'-deoxy-2'-fluoro
  misc_feature (9)..(14): 2'-deoxy
  misc_feature (15)..(15): 2'-deoxy-2'-fluoro
  misc_feature (16)..(18): 2'-deoxy
  misc_feature (19)..(19): 2'-deoxy-2'-fluoro
  misc_feature (20)..(21): n stands for thymidine
  misc_feature (20)..(20): Phosphorothioate 3'-Internucleotide Linkage
cuccauacaggaaacaggunn

SEQ ID NO: 2067 - RNA, 21 nt, Artificial Sequence
  Description of Artificial Sequence:  siNA antisense region
  misc_feature (1)..(1): 2'-deoxy
  misc_feature (2)..(3): 2'-deoxy-2'-fluoro
  misc_feature (4)..(5): 2'-deoxy
  misc_feature (6)..(10): 2'-deoxy-2'-fluoro
  misc_feature (11)..(11): 2'-deoxy
  misc_feature (12)..(13): 2'-deoxy-2'-fluoro
  misc_feature (14)..(14): 2'-deoxy
  misc_feature (15)..(15): 2'-deoxy-2'-fluoro
  misc_feature (16)..(16): 2'-deoxy
  misc_feature (17)..(18): 2'-deoxy-2'-fluoro
  misc_feature (19)..(19): 2'-deoxy
  misc_feature (20)..(21): n stands for thymidine
  misc_feature (20)..(20): Phosphorothioate 3'-Internucleotide Linkage
acugauuccugcuguguugnn

SEQ ID NO: 2068 - RNA, 21 nt, Artificial Sequence
  Description of Artificial Sequence:  siNA sense region
  misc_feature (20)..(21): n stands for thymidine
cacugccacaagaaguaccnn

SEQ ID NO: 2069 - RNA, 21 nt, Artificial Sequence
  Description of Artificial Sequence:  siNA sense region
  misc_feature (20)..(21): n stands for thymidine
gaagcagagagagagaaggnn

SEQ ID NO: 2070 - RNA, 21 nt, Artificial Sequence
  Description of Artificial Sequence:  siNA sense region
  misc_feature (20)..(21): n stands for thymidine
agaggaaccaggaggacaann

SEQ ID NO: 2071 - RNA, 21 nt, Artificial Sequence
  Description of Artificial Sequence:  siNA sense region
  misc_feature (20)..(21): n stands for thymidine
caagaggagcaugaaagugnn

SEQ ID NO: 2072 - RNA, 21 nt, Artificial Sequence
  Description of Artificial Sequence:  siNA antisense region
  misc_feature (20)..(21): n stands for thymidine
gguacuucuuguggcagugnn

SEQ ID NO: 2073 - RNA, 21 nt, Artificial Sequence
  Description of Artificial Sequence:  siNA antisense region
  misc_feature (20)..(21): n stands for thymidine
ccuucucucucucugcuucnn

SEQ ID NO: 2074 - RNA, 21 nt, Artificial Sequence
  Description of Artificial Sequence:  siNA antisense region
  misc_feature (20)..(21): n stands for thymidine
uuguccuccugguuccucunn

SEQ ID NO: 2075 - RNA, 21 nt, Artificial Sequence
  Description of Artificial Sequence:  siNA antisense region
  misc_feature (20)..(21): n stands for thymidine
cacuuucaugcuccucuugnn

SEQ ID NO: 2076 - RNA, 21 nt, Artificial Sequence
  Description of Artificial Sequence:  siNA sense region
  misc_feature (1)..(1): 2'-deoxy-2'-fluoro
  misc_feature (1)..(1): 5'-3 attached terminal deoxyabasic moeity
  misc_feature (3)..(4): 2'-deoxy-2'-fluoro
  misc_feature (6)..(7): 2'-deoxy-2'-fluoro
  misc_feature (9)..(9): 2'-deoxy-2'-fluoro
  misc_feature (16)..(16): 2'-deoxy-2'-fluoro
  misc_feature (18)..(19): 2'-deoxy-2'-fluoro
  misc_feature (20)..(21): n stands for thymidine
  misc_feature (21)..(21): 3'-3 attached terminal deoxyabasic moeity
cacugccacaagaaguaccnn

SEQ ID NO: 2077 - RNA, 21 nt, Artificial Sequence
  Description of Artificial Sequence:  siNA sense region
  misc_feature (1)..(1): 5'-3 attached terminal deoxyabasic moeity
  misc_feature (5)..(5): 2'-deoxy-2'-fluoro
  misc_feature (20)..(21): n stands for thymidine
  misc_feature (21)..(21): 3'-3 attached terminal deoxyabasic moeity
gaagcagagagagagaaggnn

SEQ ID NO: 2078 - RNA, 21 nt, Artificial Sequence
  Description of Artificial Sequence:  siNA sense region
  misc_feature (1)..(1): 5'-3 attached terminal deoxyabasic moeity
  misc_feature (8)..(9): 2'-deoxy-2'-fluoro
  misc_feature (17)..(17): 2'-deoxy-2'-fluoro
  misc_feature (20)..(21): n stands for thymidine
  misc_feature (21)..(21): 3'-3 attached terminal deoxyabasic moeity
agaggaaccaggaggacaann

SEQ ID NO: 2079 - RNA, 21 nt, Artificial Sequence
  Description of Artificial Sequence:  siNA sense region
  misc_feature (1)..(1): 2'-deoxy-2'-fluoro
  misc_feature (1)..(1): 5'-3 attached terminal deoxyabasic moeity
  misc_feature (10)..(10): 2'-deoxy-2'-fluoro
  misc_feature (12)..(12): 2'-deoxy-2'-fluoro
  misc_feature (18)..(18): 2'-deoxy-2'-fluoro
  misc_feature (20)..(21): n stands for thymidine
  misc_feature (21)..(21): 3'-3 attached terminal deoxyabasic moeity
caagaggagcaugaaagugnn

SEQ ID NO: 2080 - RNA, 21 nt, Artificial Sequence
  Description of Artificial Sequence:  siNA antisense region
  misc_feature (3)..(3): 2'-deoxy-2'-fluoro
  misc_feature (5)..(10): 2'-deoxy-2'-fluoro
  misc_feature (12)..(12): 2'-deoxy-2'-fluoro
  misc_feature (15)..(15): 2'-deoxy-2'-fluoro
  misc_feature (18)..(18): 2'-deoxy-2'-fluoro
  misc_feature (20)..(21): n stands for thymidine
  misc_feature (20)..(20): Phosphorothioate 3'-Internucleotide Linkage
gguacuucuuguggcagugnn

SEQ ID NO: 2081 - RNA, 21 nt, Artificial Sequence
  Description of Artificial Sequence:  siNA antisense region
  misc_feature (1)..(14): 2'-deoxy-2'-fluoro
  misc_feature (16)..(19): 2'-deoxy-2'-fluoro
  misc_feature (20)..(21): n stands for thymidine
  misc_feature (20)..(20): Phosphorothioate 3'-Internucleotide Linkage
ccuucucucucucugcuucnn

SEQ ID NO: 2082 - RNA, 21 nt, Artificial Sequence
  Description of Artificial Sequence:  siNA antisense region
  misc_feature (1)..(2): 2'-deoxy-2'-fluoro
  misc_feature (4)..(10): 2'-deoxy-2'-fluoro
  misc_feature (13)..(19): 2'-deoxy-2'-fluoro
  misc_feature (20)..(21): n stands for thymidine
  misc_feature (20)..(20): Phosphorothioate 3'-Internucleotide Linkage
uuguccuccugguuccucunn

SEQ ID NO: 2083 - RNA, 21 nt, Artificial Sequence
  Description of Artificial Sequence:  siNA antisense region
  misc_feature (1)..(1): 2'-deoxy-2'-fluoro
  misc_feature (3)..(7): 2'-deoxy-2'-fluoro
  misc_feature (9)..(9): 2'-deoxy-2'-fluoro
  misc_feature (11)..(18): 2'-deoxy-2'-fluoro
  misc_feature (20)..(21): n stands for thymidine
  misc_feature (20)..(20): Phosphorothioate 3'-Internucleotide Linkage
cacuuucaugcuccucuugnn

SEQ ID NO: 2084 - RNA, 21 nt, Artificial Sequence
  Description of Artificial Sequence:  siNA sense region
  misc_feature (1)..(1): 2'-deoxy-2'-fluoro
  misc_feature (1)..(1): 5'-3 attached terminal deoxyabasic moeity
  misc_feature (2)..(2): 2'-deoxy
  misc_feature (3)..(4): 2'-deoxy-2'-fluoro
  misc_feature (5)..(5): 2'-deoxy
  misc_feature (6)..(7): 2'-deoxy-2'-fluoro
  misc_feature (8)..(8): 2'-deoxy
  misc_feature (9)..(9): 2'-deoxy-2'-fluoro
  misc_feature (10)..(15): 2'-deoxy
  misc_feature (16)..(16): 2'-deoxy-2'-fluoro
  misc_feature (17)..(17): 2'-deoxy
  misc_feature (18)..(19): 2'-deoxy-2'-fluoro
  misc_feature (20)..(21): n stands for thymidine
  misc_feature (21)..(21): 3'-3 attached terminal deoxyabasic moeity
cacugccacaagaaguaccnn

SEQ ID NO: 2085 - RNA, 21 nt, Artificial Sequence
  Description of Artificial Sequence:  siNA sense region
  misc_feature (1)..(4): 2'-deoxy
  misc_feature (1)..(1): 5'-3 attached terminal deoxyabasic moeity
  misc_feature (5)..(5): 2'-deoxy-2'-fluoro
  misc_feature (6)..(19): 2'-deoxy
  misc_feature (20)..(21): n stands for thymidine
  misc_feature (21)..(21): 3'-3 attached terminal deoxyabasic moeity
gaagcagagagagagaaggnn

SEQ ID NO: 2086 - RNA, 21 nt, Artificial Sequence
  Description of Artificial Sequence:  siNA sense region
  misc_feature (1)..(7): 2'-deoxy
  misc_feature (1)..(1): 5'-3 attached terminal deoxyabasic moeity
  misc_feature (8)..(9): 2'-deoxy-2'-fluoro
  misc_feature (10)..(16): 2'-deoxy
  misc_feature (17)..(17): 2'-deoxy-2'-fluoro
  misc_feature (18)..(19): 2'-deoxy
  misc_feature (20)..(21): n stands for thymidine
  misc_feature (21)..(21): 3'-3 attached terminal deoxyabasic moeity
agaggaaccaggaggacaann

SEQ ID NO: 2087 - RNA, 21 nt, Artificial Sequence
  Description of Artificial Sequence:  siNA sense region
  misc_feature (1)..(1): 2'-deoxy-2'-fluoro
  misc_feature (1)..(1): 5'-3 attached terminal deoxyabasic moeity
  misc_feature (2)..(9): 2'-deoxy
  misc_feature (10)..(10): 2'-deoxy-2'-fluoro
  misc_feature (11)..(11): 2'-deoxy
  misc_feature (12)..(12): 2'-deoxy-2'-fluoro
  misc_feature (13)..(17): 2'-deoxy
  misc_feature (18)..(18): 2'-deoxy-2'-fluoro
  misc_feature (19)..(19): 2'-deoxy
  misc_feature (20)..(21): n stands for thymidine
  misc_feature (21)..(21): 3'-3 attached terminal deoxyabasic moeity
caagaggagcaugaaagugnn

SEQ ID NO: 2088 - RNA, 21 nt, Artificial Sequence
  Description of Artificial Sequence:  siNA antisense region
  misc_feature (1)..(2): 2'-deoxy
  misc_feature (3)..(3): 2'-deoxy-2'-fluoro
  misc_feature (4)..(4): 2'-deoxy
  misc_feature (5)..(10): 2'-deoxy-2'-fluoro
  misc_feature (11)..(11): 2'-deoxy
  misc_feature (12)..(12): 2'-deoxy-2'-fluoro
  misc_feature (13)..(14): 2'-deoxy
  misc_feature (15)..(15): 2'-deoxy-2'-fluoro
  misc_feature (16)..(17): 2'-deoxy
  misc_feature (18)..(18): 2'-deoxy-2'-fluoro
  misc_feature (19)..(19): 2'-deoxy
  misc_feature (20)..(21): n stands for thymidine
  misc_feature (20)..(20): Phosphorothioate 3'-Internucleotide Linkage
gguacuucuuguggcagugnn

SEQ ID NO: 2089 - RNA, 21 nt, Artificial Sequence
  Description of Artificial Sequence:  siNA antisense region
  misc_feature (1)..(14): 2'-deoxy-2'-fluoro
  misc_feature (15)..(15): 2'-deoxy
  misc_feature (16)..(19): 2'-deoxy-2'-fluoro
  misc_feature (20)..(21): n stands for thymidine
  misc_feature (20)..(20): Phosphorothioate 3'-Internucleotide Linkage
ccuucucucucucugcuucnn

SEQ ID NO: 2090 - RNA, 21 nt, Artificial Sequence
  Description of Artificial Sequence:  siNA antisense region
  misc_feature (1)..(2): 2'-deoxy-2'-fluoro
  misc_feature (3)..(3): 2'-deoxy
  misc_feature (4)..(10): 2'-deoxy-2'-fluoro
  misc_feature (11)..(12): 2'-deoxy
  misc_feature (13)..(19): 2'-deoxy-2'-fluoro
  misc_feature (20)..(21): n stands for thymidine
  misc_feature (20)..(20): Phosphorothioate 3'-Internucleotide Linkage
uuguccuccugguuccucunn

SEQ ID NO: 2091 - RNA, 21 nt, Artificial Sequence
  Description of Artificial Sequence:  siNA antisense region
  misc_feature (1)..(1): 2'-deoxy-2'-fluoro
  misc_feature (2)..(2): 2'-deoxy
  misc_feature (3)..(7): 2'-deoxy-2'-fluoro
  misc_feature (8)..(8): 2'-deoxy
  misc_feature (9)..(9): 2'-deoxy-2'-fluoro
  misc_feature (10)..(10): 2'-deoxy
  misc_feature (11)..(18): 2'-deoxy-2'-fluoro
  misc_feature (19)..(19): 2'-deoxy
  misc_feature (20)..(21): n stands for thymidine
  misc_feature (20)..(20): Phosphorothioate 3'-Internucleotide Linkage
cacuuucaugcuccucuugnn

SEQ ID NO: 2092 - RNA, 21 nt, Artificial Sequence
  Description of Artificial Sequence:  siNA sense region
  misc_feature (1)..(5): Phosphorothioate 3'-Internucleotide Linkage
  misc_feature (20)..(21): n stands for thymidine
  misc_feature (20)..(20): Phosphorothioate 3'-Internucleotide Linkage
cugaguuuaaaaggcacccnn

SEQ ID NO: 2093 - RNA, 21 nt, Artificial Sequence
  Description of Artificial Sequence:  siNA sense region
  misc_feature (1)..(5): Phosphorothioate 3'-Internucleotide Linkage
  misc_feature (20)..(21): n stands for thymidine
  misc_feature (20)..(20): Phosphorothioate 3'-Internucleotide Linkage
caaccacaaaauacaacaann

SEQ ID NO: 2094 - RNA, 21 nt, Artificial Sequence
  Description of Artificial Sequence:  siNA sense region
  misc_feature (1)..(5): Phosphorothioate 3'-Internucleotide Linkage
  misc_feature (20)..(21): n stands for thymidine
  misc_feature (20)..(20): Phosphorothioate 3'-Internucleotide Linkage
ccuggaaagaaucaaaaccnn

SEQ ID NO: 2095 - RNA, 21 nt, Artificial Sequence
  Description of Artificial Sequence:  siNA sense region
  misc_feature (1)..(5): Phosphorothioate 3'-Internucleotide Linkage
  misc_feature (20)..(21): n stands for thymidine
  misc_feature (20)..(20): Phosphorothioate 3'-Internucleotide Linkage
gcaaggagggccucugaugnn

SEQ ID NO: 2096 - RNA, 21 nt, Artificial Sequence
  Description of Artificial Sequence:  siNA sense region
  misc_feature (1)..(5): Phosphorothioate 3'-Internucleotide Linkage
  misc_feature (20)..(21): n stands for thymidine
  misc_feature (20)..(20): Phosphorothioate 3'-Internucleotide Linkage
gggugccuuuuaaacucagnn

SEQ ID NO: 2097 - RNA, 21 nt, Artificial Sequence
  Description of Artificial Sequence:  siNA sense region
  misc_feature (1)..(5): Phosphorothioate 3'-Internucleotide Linkage
  misc_feature (20)..(21): n stands for thymidine
  misc_feature (20)..(20): Phosphorothioate 3'-Internucleotide Linkage
uuguuguauuuugugguugnn

SEQ ID NO: 2098 - RNA, 21 nt, Artificial Sequence
  Description of Artificial Sequence:  siNA sense region
  misc_feature (1)..(5): Phosphorothioate 3'-Internucleotide Linkage
  misc_feature (20)..(21): n stands for thymidine
  misc_feature (20)..(20): Phosphorothioate 3'-Internucleotide Linkage
gguuuugauucuuuccaggnn

SEQ ID NO: 2099 - RNA, 21 nt, Artificial Sequence
  Description of Artificial Sequence:  siNA sense region
  misc_feature (1)..(5): Phosphorothioate 3'-Internucleotide Linkage
  misc_feature (20)..(21): n stands for thymidine
  misc_feature (20)..(20): Phosphorothioate 3'-Internucleotide Linkage
caucagaggcccuccuugcnn

SEQ ID NO: 2100 - RNA, 21 nt, Artificial Sequence
  Description of Artificial Sequence:  siNA sense region
  misc_feature (1)..(2): 2'-deoxy-2'-fluoro
  misc_feature (1)..(4): Phosphorothioate 3'-Internucleotide Linkage
  misc_feature (6)..(8): 2'-deoxy-2'-fluoro
  misc_feature (15)..(15): 2'-deoxy-2'-fluoro
  misc_feature (17)..(19): 2'-deoxy-2'-fluoro
  misc_feature (17)..(20): Phosphorothioate 3'-Internucleotide Linkage
  misc_feature (20)..(21): n stands for thymidine
cugaguuuaaaaggcacccnn

SEQ ID NO: 2101 - RNA, 21 nt, Artificial Sequence
  Description of Artificial Sequence:  siNA sense region
  misc_feature (1)..(1): 2'-deoxy-2'-fluoro
  misc_feature (1)..(4): Phosphorothioate 3'-Internucleotide Linkage
  misc_feature (4)..(5): 2'-deoxy-2'-fluoro
  misc_feature (7)..(7): 2'-deoxy-2'-fluoro
  misc_feature (12)..(12): 2'-deoxy-2'-fluoro
  misc_feature (14)..(14): 2'-deoxy-2'-fluoro
  misc_feature (17)..(17): 2'-deoxy-2'-fluoro
  misc_feature (17)..(20): Phosphorothioate 3'-Internucleotide Linkage
  misc_feature (20)..(21): n stands for thymidine
caaccacaaaauacaacaann

SEQ ID NO: 2102 - RNA, 21 nt, Artificial Sequence
  Description of Artificial Sequence:  siNA sense region
  misc_feature (1)..(3): 2'-deoxy-2'-fluoro
  misc_feature (1)..(4): Phosphorothioate 3'-Internucleotide Linkage
  misc_feature (12)..(13): 2'-deoxy-2'-fluoro
  misc_feature (17)..(20): Phosphorothioate 3'-Internucleotide Linkage
  misc_feature (18)..(19): 2'-deoxy-2'-fluoro
  misc_feature (20)..(21): n stands for thymidine
ccuggaaagaaucaaaaccnn

SEQ ID NO: 2103 - RNA, 21 nt, Artificial Sequence
  Description of Artificial Sequence:  siNA sense region
  misc_feature (1)..(4): Phosphorothioate 3'-Internucleotide Linkage
  misc_feature (2)..(2): 2'-deoxy-2'-fluoro
  misc_feature (11)..(15): 2'-deoxy-2'-fluoro
  misc_feature (17)..(20): Phosphorothioate 3'-Internucleotide Linkage
  misc_feature (18)..(18): 2'-deoxy-2'-fluoro
  misc_feature (20)..(21): n stands for thymidine
gcaaggagggccucugaugnn

SEQ ID NO: 2104 - RNA, 21 nt, Artificial Sequence
  Description of Artificial Sequence:  siNA antisense region
  misc_feature (1)..(20): Phosphorothioate 3'-Internucleotide Linkage
  misc_feature (20)..(21): n stands for thymidine
gggugccuuuuaaacucagnn

SEQ ID NO: 2105 - RNA, 21 nt, Artificial Sequence
  Description of Artificial Sequence:  siNA antisense region
  misc_feature (1)..(20): Phosphorothioate 3'-Internucleotide Linkage
  misc_feature (20)..(21): n stands for thymidine
uuguuguauuuugugguugnn

SEQ ID NO: 2106 - RNA, 21 nt, Artificial Sequence
  Description of Artificial Sequence:  siNA antisense region
  misc_feature (1)..(20): Phosphorothioate 3'-Internucleotide Linkage
  misc_feature (20)..(21): n stands for thymidine
gguuuugauucuuuccaggnn

SEQ ID NO: 2107 - RNA, 21 nt, Artificial Sequence
  Description of Artificial Sequence:  siNA antisense region
  misc_feature (1)..(20): Phosphorothioate 3'-Internucleotide Linkage
  misc_feature (20)..(21): n stands for thymidine
caucagaggcccuccuugcnn

SEQ ID NO: 2108 - RNA, 21 nt, Artificial Sequence
  Description of Artificial Sequence:  siNA sense region
caaccacaaaauacaacaaga

SEQ ID NO: 2109 - RNA, 21 nt, Artificial Sequence
  Description of Artificial Sequence:  siNA antisense region
uuguuguauuuugugguuguu

SEQ ID NO: 2110 - RNA, 21 nt, Artificial Sequence
  Description of Artificial Sequence:  inverted control/siNA sense
  misc_feature (1)..(5): Phosphorothioate 3'-Internucleotide Linkage
  misc_feature (20)..(21): n stands for thymidine
  misc_feature (20)..(20): Phosphorothioate 3'-Internucleotide Linkage
aacaacauaaaacaccaacnn

SEQ ID NO: 2111 - RNA, 21 nt, Artificial Sequence
  Description of Artificial Sequence:  inverted control/siNA sense
  misc_feature (1)..(5): Phosphorothioate 3'-Internucleotide Linkage
  misc_feature (20)..(21): n stands for thymidine
  misc_feature (20)..(20): Phosphorothioate 3'-Internucleotide Linkage
guugguguuuuauguuguunn

SEQ ID NO: 2112 - RNA, 21 nt, Artificial Sequence
  Description of Artificial Sequence:  inverted control/siNA sense
  misc_feature (1)..(4): Phosphorothioate 3'-Internucleotide Linkage
  misc_feature (3)..(3): 2'-deoxy-2'-fluoro
  misc_feature (6)..(6): 2'-deoxy-2'-fluoro
  misc_feature (8)..(8): 2'-deoxy-2'-fluoro
  misc_feature (13)..(13): 2'-deoxy-2'-fluoro
  misc_feature (15)..(16): 2'-deoxy-2'-fluoro
  misc_feature (17)..(20): Phosphorothioate 3'-Internucleotide Linkage
  misc_feature (19)..(19): 2'-deoxy-2'-fluoro
  misc_feature (20)..(21): n stands for thymidine
aacaacauaaaacaccaacnn

SEQ ID NO: 2113 - RNA, 21 nt, Artificial Sequence
  Description of Artificial Sequence:  inverted control/siNA sense
  misc_feature (1)..(20): Phosphorothioate 3'-Internucleotide Linkage
  misc_feature (20)..(21): n stands for thymidine
guugguguuuuauguuguunn

SEQ ID NO: 2114 - RNA, 21 nt, Artificial Sequence
  Description of Artificial Sequence:  siNA sense region
agaacaacauaaaacaccaac

SEQ ID NO: 2115 - RNA, 21 nt, Artificial Sequence
  Description of Artificial Sequence:  inverted control/siNA sense
uuguugguguuuuauguuguu

SEQ ID NO: 2116 - RNA, 21 nt, Artificial Sequence
  Description of Artificial Sequence:  siNA sense region
  misc_feature (20)..(21): n stands for thymidine
caaccacaaaauacaacaann

SEQ ID NO: 2117 - RNA, 21 nt, Artificial Sequence
  Description of Artificial Sequence:  siNA antisense region
  misc_feature (20)..(21): n stands for thymidine
uuguuguauuuugugguugnn

SEQ ID NO: 2118 - RNA, 21 nt, Artificial Sequence
  Description of Artificial Sequence:  inverted control/siNA sense
  misc_feature (20)..(21): n stands for thymidine
agaacaacauaaaacaccann

SEQ ID NO: 2119 - RNA, 21 nt, Artificial Sequence
  Description of Artificial Sequence:  inverted control/siNA sense
  misc_feature (20)..(21): n stands for thymidine
uuguugguguuuuauguugnn

SEQ ID NO: 2120 - RNA, 21 nt, Artificial Sequence
  Description of Artificial Sequence:  siNA antisense region
  misc_feature (1)..(2): 2'-deoxy-2'-fluoro
  misc_feature (4)..(5): 2'-deoxy-2'-fluoro
  misc_feature (7)..(7): 2'-deoxy-2'-fluoro
  misc_feature (9)..(12): 2'-deoxy-2'-fluoro
  misc_feature (14)..(14): 2'-deoxy-2'-fluoro
  misc_feature (17)..(18): 2'-deoxy-2'-fluoro
  misc_feature (20)..(21): n stands for thymidine
uuguuguauuuugugguugnn

SEQ ID NO: 2121 - RNA, 21 nt, Artificial Sequence
  Description of Artificial Sequence:  siNA antisense region
  misc_feature (1)..(2): 2'-deoxy-2'-fluoro
  misc_feature (4)..(5): 2'-deoxy-2'-fluoro
  misc_feature (7)..(7): 2'-deoxy-2'-fluoro
  misc_feature (9)..(12): 2'-deoxy-2'-fluoro
  misc_feature (14)..(14): 2'-deoxy-2'-fluoro
  misc_feature (17)..(18): 2'-deoxy-2'-fluoro
  misc_feature (20)..(21): n stands for 5-Nitroindole universal base
uuguuguauuuugugguugnn

SEQ ID NO: 2122 - RNA, 21 nt, Artificial Sequence
  Description of Artificial Sequence:  siNA antisense region
  misc_feature (1)..(2): 2'-deoxy-2'-fluoro
  misc_feature (4)..(5): 2'-deoxy-2'-fluoro
  misc_feature (7)..(7): 2'-deoxy-2'-fluoro
  misc_feature (9)..(12): 2'-deoxy-2'-fluoro
  misc_feature (14)..(14): 2'-deoxy-2'-fluoro
  misc_feature (17)..(18): 2'-deoxy-2'-fluoro
  misc_feature (20)..(21): n stands for 3-Nitropyrole universal base
uuguuguauuuugugguugnn

SEQ ID NO: 2123 - RNA, 21 nt, Artificial Sequence
  Description of Artificial Sequence:  siNA sense region
  misc_feature (1)..(1): 2'-deoxy-2'-fluoro
  misc_feature (1)..(1): 5'-3 attached terminal deoxyabasic moeity
  misc_feature (4)..(5): 2'-deoxy-2'-fluoro
  misc_feature (7)..(7): 2'-deoxy-2'-fluoro
  misc_feature (12)..(12): 2'-deoxy-2'-fluoro
  misc_feature (14)..(14): 2'-deoxy-2'-fluoro
  misc_feature (17)..(17): 2'-deoxy-2'-fluoro
  misc_feature (20)..(21): n stands for thymidine
  misc_feature (21)..(21): 3'-3 attached terminal deoxyabasic moeity
caaccacaaaauacaacaann

SEQ ID NO: 2124 - RNA, 21 nt, Artificial Sequence
  Description of Artificial Sequence:  siNA sense region
  misc_feature (1)..(1): 2'-deoxy-2'-fluoro
  misc_feature (4)..(5): 2'-deoxy-2'-fluoro
  misc_feature (7)..(7): 2'-deoxy-2'-fluoro
  misc_feature (12)..(12): 2'-deoxy-2'-fluoro
  misc_feature (14)..(14): 2'-deoxy-2'-fluoro
  misc_feature (17)..(17): 2'-deoxy-2'-fluoro
  misc_feature (20)..(21): n stands for thymidine
caaccacaaaauacaacaann

SEQ ID NO: 2125 - RNA, 21 nt, Artificial Sequence
  Description of Artificial Sequence:  siNA antisense region
  misc_feature (1)..(2): 2'-deoxy-2'-fluoro
  misc_feature (4)..(5): 2'-deoxy-2'-fluoro
  misc_feature (7)..(7): 2'-deoxy-2'-fluoro
  misc_feature (9)..(12): 2'-deoxy-2'-fluoro
  misc_feature (14)..(14): 2'-deoxy-2'-fluoro
  misc_feature (17)..(18): 2'-deoxy-2'-fluoro
  misc_feature (20)..(20): n stands for thymidine
  misc_feature (21)..(21): n stands for 3',3'-inverted thymidine
uuguuguauuuugugguugnn

SEQ ID NO: 2126 - RNA, 21 nt, Artificial Sequence
  Description of Artificial Sequence:  siNA antisense region
  misc_feature (1)..(2): 2'-deoxy-2'-fluoro
  misc_feature (4)..(5): 2'-deoxy-2'-fluoro
  misc_feature (7)..(7): 2'-deoxy-2'-fluoro
  misc_feature (9)..(12): 2'-deoxy-2'-fluoro
  misc_feature (14)..(14): 2'-deoxy-2'-fluoro
  misc_feature (17)..(18): 2'-deoxy-2'-fluoro
  misc_feature (20)..(20): n stands for thymidine
  misc_feature (21)..(21): n stands for glyceryl
uuguuguauuuugugguugnn

SEQ ID NO: 2127 - RNA, 21 nt, Artificial Sequence
  Description of Artificial Sequence:  siNA antisense region
  misc_feature (1)..(2): 2'-deoxy-2'-fluoro
  misc_feature (4)..(5): 2'-deoxy-2'-fluoro
  misc_feature (7)..(7): 2'-deoxy-2'-fluoro
  misc_feature (9)..(12): 2'-deoxy-2'-fluoro
  misc_feature (14)..(14): 2'-deoxy-2'-fluoro
  misc_feature (17)..(18): 2'-deoxy-2'-fluoro
  misc_feature (20)..(20): n stands for thymidine
  misc_feature (21)..(21): n stands for 3'-O-methyl uridine
uuguuguauuuugugguugnn

SEQ ID NO: 2128 - RNA, 21 nt, Artificial Sequence
  Description of Artificial Sequence:  siNA antisense region
  misc_feature (1)..(2): 2'-deoxy-2'-fluoro
  misc_feature (4)..(5): 2'-deoxy-2'-fluoro
  misc_feature (7)..(7): 2'-deoxy-2'-fluoro
  misc_feature (9)..(12): 2'-deoxy-2'-fluoro
  misc_feature (14)..(14): 2'-deoxy-2'-fluoro
  misc_feature (17)..(18): 2'-deoxy-2'-fluoro
  misc_feature (20)..(20): n stands for thymidine
  misc_feature (21)..(21): n stands for L-thymidine
uuguuguauuuugugguugnn

SEQ ID NO: 2129 - RNA, 21 nt, Artificial Sequence
  Description of Artificial Sequence:  siNA antisense region
  misc_feature (1)..(2): 2'-deoxy-2'-fluoro
  misc_feature (4)..(5): 2'-deoxy-2'-fluoro
  misc_feature (7)..(7): 2'-deoxy-2'-fluoro
  misc_feature (9)..(12): 2'-deoxy-2'-fluoro
  misc_feature (14)..(14): 2'-deoxy-2'-fluoro
  misc_feature (17)..(18): 2'-deoxy-2'-fluoro
  misc_feature (20)..(20): n stands for thymidine
  misc_feature (21)..(21): n stands for L-uridine
uuguuguauuuugugguugnn

SEQ ID NO: 2130 - RNA, 21 nt, Artificial Sequence
  Description of Artificial Sequence:  siNA antisense region
  misc_feature (1)..(2): 2'-deoxy-2'-fluoro
  misc_feature (4)..(5): 2'-deoxy-2'-fluoro
  misc_feature (7)..(7): 2'-deoxy-2'-fluoro
  misc_feature (9)..(12): 2'-deoxy-2'-fluoro
  misc_feature (14)..(14): 2'-deoxy-2'-fluoro
  misc_feature (17)..(18): 2'-deoxy-2'-fluoro
  misc_feature (20)..(20): n stands for thymidine
  misc_feature (21)..(21): n stands for 3',3'-inverted thymidine
uuguuguauuuugugguugnn

SEQ ID NO: 2131 - RNA, 21 nt, Artificial Sequence
  Description of Artificial Sequence:  siNA antisense region
  misc_feature (1)..(2): 2'-deoxy-2'-fluoro
  misc_feature (4)..(5): 2'-deoxy-2'-fluoro
  misc_feature (7)..(7): 2'-deoxy-2'-fluoro
  misc_feature (9)..(12): 2'-deoxy-2'-fluoro
  misc_feature (14)..(14): 2'-deoxy-2'-fluoro
  misc_feature (17)..(18): 2'-deoxy-2'-fluoro
  misc_feature (20)..(20): n stands for 3',3'-inverted thymidine
  misc_feature (21)..(21): n stands for thymidine
uuguuguauuuugugguugnn

SEQ ID NO: 2132 - RNA, 21 nt, Artificial Sequence
  Description of Artificial Sequence:  siNA antisense region
  misc_feature (1)..(2): 2'-deoxy-2'-fluoro
  misc_feature (4)..(5): 2'-deoxy-2'-fluoro
  misc_feature (7)..(7): 2'-deoxy-2'-fluoro
  misc_feature (9)..(12): 2'-deoxy-2'-fluoro
  misc_feature (14)..(14): 2'-deoxy-2'-fluoro
  misc_feature (17)..(18): 2'-deoxy-2'-fluoro
  misc_feature (20)..(21): n stands for thymidine
  misc_feature (20)..(20): Phosphorothioate 3'-Internucleotide Linkage
uuguuguauuuugugguugnn

SEQ ID NO: 2133 - RNA, 21 nt, Artificial Sequence
  Description of Artificial Sequence:  siNA sense region
  misc_feature (1)..(1): 5'-3 attached terminal deoxyabasic moeity
  misc_feature (2)..(2): 2'-deoxy-2'-fluoro
  misc_feature (4)..(4): 2'-deoxy-2'-fluoro
  misc_feature (11)..(11): 2'-deoxy-2'-fluoro
  misc_feature (15)..(16): 2'-deoxy-2'-fluoro
  misc_feature (18)..(19): 2'-deoxy-2'-fluoro
  misc_feature (20)..(21): n stands for thymidine
  misc_feature (21)..(21): 3'-3 attached terminal deoxyabasic moeity
guguaaggaguggaccaucnn

SEQ ID NO: 2134 - RNA, 21 nt, Artificial Sequence
  Description of Artificial Sequence:  siNA sense region
  misc_feature (1)..(1): 5'-3 attached terminal deoxyabasic moeity
  misc_feature (2)..(2): 2'-deoxy-2'-fluoro
  misc_feature (7)..(7): 2'-deoxy-2'-fluoro
  misc_feature (9)..(10): 2'-deoxy-2'-fluoro
  misc_feature (12)..(13): 2'-deoxy-2'-fluoro
  misc_feature (15)..(15): 2'-deoxy-2'-fluoro
  misc_feature (20)..(21): n stands for thymidine
  misc_feature (21)..(21): 3'-3 attached terminal deoxyabasic moeity
acggaguauugcugugggann

SEQ ID NO: 2135 - RNA, 21 nt, Artificial Sequence
  Description of Artificial Sequence:  siNA sense region
  misc_feature (1)..(1): 5'-3 attached terminal deoxyabasic moeity
  misc_feature (2)..(2): 2'-deoxy-2'-fluoro
  misc_feature (6)..(8): 2'-deoxy-2'-fluoro
  misc_feature (13)..(13): 2'-deoxy-2'-fluoro
  misc_feature (15)..(15): 2'-deoxy-2'-fluoro
  misc_feature (17)..(17): 2'-deoxy-2'-fluoro
  misc_feature (20)..(21): n stands for thymidine
  misc_feature (21)..(21): 3'-3 attached terminal deoxyabasic moeity
gcaggccuaagacaugugann

SEQ ID NO: 2136 - RNA, 21 nt, Artificial Sequence
  Description of Artificial Sequence:  siNA sense region
  misc_feature (1)..(1): 2'-deoxy-2'-fluoro
  misc_feature (1)..(1): 5'-3 attached terminal deoxyabasic moeity
  misc_feature (8)..(8): 2'-deoxy-2'-fluoro
  misc_feature (20)..(21): n stands for thymidine
  misc_feature (21)..(21): 3'-3 attached terminal deoxyabasic moeity
caaaaagcaagggagaaaann

SEQ ID NO: 2137 - RNA, 21 nt, Artificial Sequence
  Description of Artificial Sequence:  siNA antisense region
  misc_feature (3)..(3): 2'-deoxy-2'-fluoro
  misc_feature (6)..(8): 2'-deoxy-2'-fluoro
  misc_feature (10)..(15): 2'-deoxy-2'-fluoro
  misc_feature (17)..(17): 2'-deoxy-2'-fluoro
  misc_feature (19)..(19): 2'-deoxy-2'-fluoro
  misc_feature (20)..(21): n stands for thymidine
  misc_feature (20)..(20): Phosphorothioate 3'-Internucleotide Linkage
gaugguccacuccuuacacnn

SEQ ID NO: 2138 - RNA, 21 nt, Artificial Sequence
  Description of Artificial Sequence:  siNA antisense region
  misc_feature (1)..(4): 2'-deoxy-2'-fluoro
  misc_feature (6)..(6): 2'-deoxy-2'-fluoro
  misc_feature (9)..(9): 2'-deoxy-2'-fluoro
  misc_feature (12)..(12): 2'-deoxy-2'-fluoro
  misc_feature (14)..(17): 2'-deoxy-2'-fluoro
  misc_feature (19)..(19): 2'-deoxy-2'-fluoro
  misc_feature (20)..(21): n stands for thymidine
  misc_feature (20)..(20): Phosphorothioate 3'-Internucleotide Linkage
ucccacagcaauacuccgunn

SEQ ID NO: 2139 - RNA, 21 nt, Artificial Sequence
  Description of Artificial Sequence:  siNA antisense region
  misc_feature (1)..(2): 2'-deoxy-2'-fluoro
  misc_feature (4)..(4): 2'-deoxy-2'-fluoro
  misc_feature (6)..(6): 2'-deoxy-2'-fluoro
  misc_feature (8)..(11): 2'-deoxy-2'-fluoro
  misc_feature (15)..(17): 2'-deoxy-2'-fluoro
  misc_feature (19)..(19): 2'-deoxy-2'-fluoro
  misc_feature (20)..(21): n stands for thymidine
  misc_feature (20)..(20): Phosphorothioate 3'-Internucleotide Linkage
ucacaugucuuaggccugcnn

SEQ ID NO: 2140 - RNA, 21 nt, Artificial Sequence
  Description of Artificial Sequence:  siNA antisense region
  misc_feature (1)..(11): 2'-deoxy-2'-fluoro
  misc_feature (13)..(18): 2'-deoxy-2'-fluoro
  misc_feature (20)..(21): n stands for thymidine
  misc_feature (20)..(20): Phosphorothioate 3'-Internucleotide Linkage
uuuucucccuugcuuuuugnn

SEQ ID NO: 2141 - RNA, 21 nt, Artificial Sequence
  Description of Artificial Sequence:  siNA sense region
  misc_feature (1)..(1): 2'-deoxy-2'-fluoro
  misc_feature (1)..(1): 5'-3 attached terminal deoxyabasic moeity
  misc_feature (2)..(3): 2'-deoxy
  misc_feature (4)..(5): 2'-deoxy-2'-fluoro
  misc_feature (6)..(6): 2'-deoxy
  misc_feature (7)..(7): 2'-deoxy-2'-fluoro
  misc_feature (8)..(11): 2'-deoxy
  misc_feature (12)..(12): 2'-deoxy-2'-fluoro
  misc_feature (13)..(13): 2'-deoxy
  misc_feature (14)..(14): 2'-deoxy-2'-fluoro
  misc_feature (15)..(16): 2'-deoxy
  misc_feature (17)..(17): 2'-deoxy-2'-fluoro
  misc_feature (18)..(19): 2'-deoxy
  misc_feature (20)..(21): n stands for thymidine
  misc_feature (21)..(21): 3'-3 attached terminal deoxyabasic moeity
caaccacaaaauacaacaann

SEQ ID NO: 2142 - RNA, 21 nt, Artificial Sequence
  Description of Artificial Sequence:  siNA antisense region
  misc_feature (1)..(2): 2'-deoxy-2'-fluoro
  misc_feature (4)..(5): 2'-deoxy-2'-fluoro
  misc_feature (7)..(7): 2'-deoxy-2'-fluoro
  misc_feature (9)..(12): 2'-deoxy-2'-fluoro
  misc_feature (14)..(14): 2'-deoxy-2'-fluoro
  misc_feature (17)..(18): 2'-deoxy-2'-fluoro
  misc_feature (20)..(21): n stands for thymidine
  misc_feature (20)..(20): Phosphorothioate 3'-Internucleotide Linkage
uuguuguauuuugugguugnn

SEQ ID NO: 2143 - RNA, 21 nt, Artificial Sequence
  Description of Artificial Sequence:  inverted control/siNA sense
  misc_feature (20)..(21): n stands for thymidine
aacaacauaaaacaccaacnn

SEQ ID NO: 2144 - RNA, 21 nt, Artificial Sequence
  Description of Artificial Sequence:  inverted control/siNA sense
  misc_feature (20)..(21): n stands for thymidine
guugguguuuuauguuguunn

SEQ ID NO: 2145 - RNA, 21 nt, Artificial Sequence
  Description of Artificial Sequence:  inverted control/siNA sense
  misc_feature (1)..(1): 5'-3 attached terminal deoxyabasic moeity
  misc_feature (3)..(3): 2'-deoxy-2'-fluoro
  misc_feature (6)..(6): 2'-deoxy-2'-fluoro
  misc_feature (8)..(8): 2'-deoxy-2'-fluoro
  misc_feature (13)..(13): 2'-deoxy-2'-fluoro
  misc_feature (15)..(16): 2'-deoxy-2'-fluoro
  misc_feature (19)..(19): 2'-deoxy-2'-fluoro
  misc_feature (20)..(21): n stands for thymidine
  misc_feature (21)..(21): 3'-3 attached terminal deoxyabasic moeity
aacaacauaaaacaccaacnn

SEQ ID NO: 2146 - RNA, 21 nt, Artificial Sequence
  Description of Artificial Sequence:  inverted control/siNA sense
  misc_feature (2)..(3): 2'-deoxy-2'-fluoro
  misc_feature (6)..(6): 2'-deoxy-2'-fluoro
  misc_feature (8)..(11): 2'-deoxy-2'-fluoro
  misc_feature (13)..(13): 2'-deoxy-2'-fluoro
  misc_feature (15)..(16): 2'-deoxy-2'-fluoro
  misc_feature (18)..(19): 2'-deoxy-2'-fluoro
  misc_feature (20)..(21): n stands for thymidine
  misc_feature (20)..(20): Phosphorothioate 3'-Internucleotide Linkage
guugguguuuuauguuguunn

SEQ ID NO: 2147 - RNA, 21 nt, Artificial Sequence
  Description of Artificial Sequence:  inverted control/siNA sense
  misc_feature (1)..(2): 2'-deoxy
  misc_feature (1)..(1): 5'-3 attached terminal deoxyabasic moeity
  misc_feature (3)..(3): 2'-deoxy-2'-fluoro
  misc_feature (4)..(5): 2'-deoxy
  misc_feature (6)..(6): 2'-deoxy-2'-fluoro
  misc_feature (7)..(7): 2'-deoxy
  misc_feature (8)..(8): 2'-deoxy-2'-fluoro
  misc_feature (9)..(12): 2'-deoxy
  misc_feature (13)..(13): 2'-deoxy-2'-fluoro
  misc_feature (14)..(14): 2'-deoxy
  misc_feature (15)..(16): 2'-deoxy-2'-fluoro
  misc_feature (17)..(18): 2'-deoxy
  misc_feature (19)..(19): 2'-deoxy-2'-fluoro
  misc_feature (20)..(21): n stands for thymidine
  misc_feature (21)..(21): 3'-3 attached terminal deoxyabasic moeity
aacaacauaaaacaccaacnn

SEQ ID NO: 2148 - RNA, 21 nt, Artificial Sequence
  Description of Artificial Sequence:  inverted control/siNA sense
  misc_feature (2)..(3): 2'-deoxy-2'-fluoro
  misc_feature (6)..(6): 2'-deoxy-2'-fluoro
  misc_feature (8)..(11): 2'-deoxy-2'-fluoro
  misc_feature (13)..(13): 2'-deoxy-2'-fluoro
  misc_feature (15)..(16): 2'-deoxy-2'-fluoro
  misc_feature (18)..(19): 2'-deoxy-2'-fluoro
  misc_feature (20)..(21): n stands for thymidine
  misc_feature (20)..(20): Phosphorothioate 3'-Internucleotide Linkage
guugguguuuuauguuguunn

SEQ ID NO: 2149 - RNA, 21 nt, Artificial Sequence
  Description of Artificial Sequence:  siNA sense region
  misc_feature (20)..(21): n stands for thymidine
cugaguuuaaaaggcacccnn

SEQ ID NO: 2150 - RNA, 21 nt, Artificial Sequence
  Description of Artificial Sequence:  siNA antisense region
  misc_feature (20)..(21): n stands for thymidine
gcaaggagggccucugaugnn

SEQ ID NO: 2151 - RNA, 21 nt, Artificial Sequence
  Description of Artificial Sequence:  siNA sense region
  misc_feature (20)..(21): n stands for thymidine
ccuggaaagaaucaaaaccnn

SEQ ID NO: 2152 - RNA, 21 nt, Artificial Sequence
  Description of Artificial Sequence:  siNA antisense region
  misc_feature (20)..(21): n stands for thymidine
gggugccuuuuaaacucagnn

SEQ ID NO: 2153 - RNA, 21 nt, Artificial Sequence
  Description of Artificial Sequence:  siNA sense region
  misc_feature (20)..(21): n stands for thymidine
caucagaggcccuccuugcnn

SEQ ID NO: 2154 - RNA, 21 nt, Artificial Sequence
  Description of Artificial Sequence:  siNA antisense region
  misc_feature (20)..(21): n stands for thymidine
gguuuugauucuuuccaggnn

SEQ ID NO: 2155 - RNA, 21 nt, Artificial Sequence
  Description of Artificial Sequence:  siNA sense region
  misc_feature (1)..(2): 2'-deoxy-2'-fluoro
  misc_feature (1)..(1): 5'-3 attached terminal deoxyabasic moeity
  misc_feature (6)..(8): 2'-deoxy-2'-fluoro
  misc_feature (15)..(15): 2'-deoxy-2'-fluoro
  misc_feature (17)..(19): 2'-deoxy-2'-fluoro
  misc_feature (20)..(21): n stands for thymidine
  misc_feature (21)..(21): 3'-3 attached terminal deoxyabasic moeity
cugaguuuaaaaggcacccnn

SEQ ID NO: 2156 - RNA, 21 nt, Artificial Sequence
  Description of Artificial Sequence:  siNA sense region
  misc_feature (1)..(1): 5'-3 attached terminal deoxyabasic moeity
  misc_feature (2)..(2): 2'-deoxy-2'-fluoro
  misc_feature (11)..(15): 2'-deoxy-2'-fluoro
  misc_feature (18)..(18): 2'-deoxy-2'-fluoro
  misc_feature (20)..(21): n stands for thymidine
  misc_feature (21)..(21): 3'-3 attached terminal deoxyabasic moeity
gcaaggagggccucugaugnn

SEQ ID NO: 2157 - RNA, 21 nt, Artificial Sequence
  Description of Artificial Sequence:  siNA sense region
  misc_feature (1)..(3): 2'-deoxy-2'-fluoro
  misc_feature (1)..(1): 5'-3 attached terminal deoxyabasic moeity
  misc_feature (12)..(13): 2'-deoxy-2'-fluoro
  misc_feature (18)..(19): 2'-deoxy-2'-fluoro
  misc_feature (20)..(21): n stands for thymidine
  misc_feature (21)..(21): 3'-3 attached terminal deoxyabasic moeity
ccuggaaagaaucaaaaccnn

SEQ ID NO: 2158 - RNA, 21 nt, Artificial Sequence
  Description of Artificial Sequence:  siNA antisense region
  misc_feature (4)..(4): 2'-deoxy-2'-fluoro
  misc_feature (6)..(11): 2'-deoxy-2'-fluoro
  misc_feature (15)..(17): 2'-deoxy-2'-fluoro
  misc_feature (20)..(21): n stands for thymidine
  misc_feature (20)..(20): Phosphorothioate 3'-Internucleotide Linkage
gggugccuuuuaaacucagnn

SEQ ID NO: 2159 - RNA, 21 nt, Artificial Sequence
  Description of Artificial Sequence:  siNA antisense region
  misc_feature (1)..(1): 2'-deoxy-2'-fluoro
  misc_feature (3)..(4): 2'-deoxy-2'-fluoro
  misc_feature (10)..(17): 2'-deoxy-2'-fluoro
  misc_feature (19)..(19): 2'-deoxy-2'-fluoro
  misc_feature (20)..(21): n stands for thymidine
  misc_feature (20)..(20): Phosphorothioate 3'-Internucleotide Linkage
caucagaggcccuccuugcnn

SEQ ID NO: 2160 - RNA, 21 nt, Artificial Sequence
  Description of Artificial Sequence:  siNA antisense region
  misc_feature (3)..(6): 2'-deoxy-2'-fluoro
  misc_feature (9)..(16): 2'-deoxy-2'-fluoro
  misc_feature (20)..(21): n stands for thymidine
  misc_feature (20)..(20): Phosphorothioate 3'-Internucleotide Linkage
gguuuugauucuuuccaggnn

SEQ ID NO: 2161 - RNA, 21 nt, Artificial Sequence
  Description of Artificial Sequence:  siNA sense region
  misc_feature (1)..(2): 2'-deoxy-2'-fluoro
  misc_feature (1)..(1): 5'-3 attached terminal deoxyabasic moeity
  misc_feature (3)..(5): 2'-deoxy
  misc_feature (6)..(8): 2'-deoxy-2'-fluoro
  misc_feature (9)..(14): 2'-deoxy
  misc_feature (15)..(15): 2'-deoxy-2'-fluoro
  misc_feature (16)..(16): 2'-deoxy
  misc_feature (17)..(19): 2'-deoxy-2'-fluoro
  misc_feature (20)..(21): n stands for thymidine
  misc_feature (21)..(21): 3'-3 attached terminal deoxyabasic moeity
cugaguuuaaaaggcacccnn

SEQ ID NO: 2162 - RNA, 21 nt, Artificial Sequence
  Description of Artificial Sequence:  siNA sense region
  misc_feature (1)..(1): 2'-deoxy
  misc_feature (1)..(1): 5'-3 attached terminal deoxyabasic moeity
  misc_feature (2)..(2): 2'-deoxy-2'-fluoro
  misc_feature (3)..(10): 2'-deoxy
  misc_feature (11)..(15): 2'-deoxy-2'-fluoro
  misc_feature (16)..(17): 2'-deoxy
  misc_feature (18)..(18): 2'-deoxy-2'-fluoro
  misc_feature (19)..(19): 2'-deoxy
  misc_feature (20)..(21): n stands for thymidine
  misc_feature (21)..(21): 3'-3 attached terminal deoxyabasic moeity
gcaaggagggccucugaugnn

SEQ ID NO: 2163 - RNA, 21 nt, Artificial Sequence
  Description of Artificial Sequence:  siNA sense region
  misc_feature (1)..(3): 2'-deoxy-2'-fluoro
  misc_feature (1)..(1): 5'-3 attached terminal deoxyabasic moeity
  misc_feature (4)..(11): 2'-deoxy
  misc_feature (12)..(13): 2'-deoxy-2'-fluoro
  misc_feature (14)..(17): 2'-deoxy
  misc_feature (18)..(19): 2'-deoxy-2'-fluoro
  misc_feature (20)..(21): n stands for thymidine
  misc_feature (21)..(21): 3'-3 attached terminal deoxyabasic moeity
ccuggaaagaaucaaaaccnn

SEQ ID NO: 2164 - RNA, 21 nt, Artificial Sequence
  Description of Artificial Sequence:  siNA antisense region
  misc_feature (4)..(4): 2'-deoxy-2'-fluoro
  misc_feature (6)..(11): 2'-deoxy-2'-fluoro
  misc_feature (15)..(17): 2'-deoxy-2'-fluoro
  misc_feature (20)..(21): n stands for thymidine
  misc_feature (20)..(20): Phosphorothioate 3'-Internucleotide Linkage
gggugccuuuuaaacucagnn

SEQ ID NO: 2165 - RNA, 21 nt, Artificial Sequence
  Description of Artificial Sequence:  siNA antisense region
  misc_feature (1)..(1): 2'-deoxy-2'-fluoro
  misc_feature (3)..(4): 2'-deoxy-2'-fluoro
  misc_feature (10)..(17): 2'-deoxy-2'-fluoro
  misc_feature (19)..(19): 2'-deoxy-2'-fluoro
  misc_feature (20)..(21): n stands for thymidine
  misc_feature (20)..(20): Phosphorothioate 3'-Internucleotide Linkage
caucagaggcccuccuugcnn

SEQ ID NO: 2166 - RNA, 21 nt, Artificial Sequence
  Description of Artificial Sequence:  siNA antisense region
  misc_feature (3)..(6): 2'-deoxy-2'-fluoro
  misc_feature (9)..(16): 2'-deoxy-2'-fluoro
  misc_feature (20)..(21): n stands for thymidine
  misc_feature (20)..(20): Phosphorothioate 3'-Internucleotide Linkage
gguuuugauucuuuccaggnn

SEQ ID NO: 2167 - RNA, 21 nt, Artificial Sequence
  Description of Artificial Sequence:  inverted control/siNA sense
  misc_feature (20)..(21): n stands for thymidine
cccacggaaaauuugagucnn

SEQ ID NO: 2168 - RNA, 21 nt, Artificial Sequence
  Description of Artificial Sequence:  inverted control/siNA sense
  misc_feature (20)..(21): n stands for thymidine
guagucuccgggaggaacgnn

SEQ ID NO: 2169 - RNA, 21 nt, Artificial Sequence
  Description of Artificial Sequence:  inverted control/siNA sense
  misc_feature (20)..(21): n stands for thymidine
ccaaaacuaagaaagguccnn

SEQ ID NO: 2170 - RNA, 21 nt, Artificial Sequence
  Description of Artificial Sequence:  inverted control/siNA sense
  misc_feature (20)..(21): n stands for thymidine
gacucaaauuuuccgugggnn

SEQ ID NO: 2171 - RNA, 21 nt, Artificial Sequence
  Description of Artificial Sequence:  inverted control/siNA sense
  misc_feature (20)..(21): n stands for thymidine
cguuccucccggagacuacnn

SEQ ID NO: 2172 - RNA, 21 nt, Artificial Sequence
  Description of Artificial Sequence:  inverted control/siNA sense
  misc_feature (20)..(21): n stands for thymidine
ggaccuuucuuaguuuuggnn

SEQ ID NO: 2173 - RNA, 21 nt, Artificial Sequence
  Description of Artificial Sequence:  inverted control/siNA sense
  misc_feature (1)..(3): 2'-deoxy-2'-fluoro
  misc_feature (1)..(1): 5'-3 attached terminal deoxyabasic moeity
  misc_feature (5)..(5): 2'-deoxy-2'-fluoro
  misc_feature (12)..(14): 2'-deoxy-2'-fluoro
  misc_feature (18)..(19): 2'-deoxy-2'-fluoro
  misc_feature (20)..(21): n stands for thymidine
  misc_feature (21)..(21): 3'-3 attached terminal deoxyabasic moeity
cccacggaaaauuugagucnn

SEQ ID NO: 2174 - RNA, 21 nt, Artificial Sequence
  Description of Artificial Sequence:  inverted control/siNA sense
  misc_feature (1)..(1): 5'-3 attached terminal deoxyabasic moeity
  misc_feature (2)..(2): 2'-deoxy-2'-fluoro
  misc_feature (5)..(9): 2'-deoxy-2'-fluoro
  misc_feature (18)..(18): 2'-deoxy-2'-fluoro
  misc_feature (20)..(21): n stands for thymidine
  misc_feature (21)..(21): 3'-3 attached terminal deoxyabasic moeity
guagucuccgggaggaacgnn

SEQ ID NO: 2175 - RNA, 21 nt, Artificial Sequence
  Description of Artificial Sequence:  inverted control/siNA sense
  misc_feature (1)..(2): 2'-deoxy-2'-fluoro
  misc_feature (1)..(1): 5'-3 attached terminal deoxyabasic moeity
  misc_feature (7)..(8): 2'-deoxy-2'-fluoro
  misc_feature (17)..(19): 2'-deoxy-2'-fluoro
  misc_feature (20)..(21): n stands for thymidine
  misc_feature (21)..(21): 3'-3 attached terminal deoxyabasic moeity
ccaaaacuaagaaagguccnn

SEQ ID NO: 2176 - RNA, 21 nt, Artificial Sequence
  Description of Artificial Sequence:  inverted control/siNA sense
  misc_feature (3)..(5): 2'-deoxy-2'-fluoro
  misc_feature (9)..(14): 2'-deoxy-2'-fluoro
  misc_feature (16)..(16): 2'-deoxy-2'-fluoro
  misc_feature (20)..(21): n stands for thymidine
  misc_feature (20)..(20): Phosphorothioate 3'-Internucleotide Linkage
gacucaaauuuuccgugggnn

SEQ ID NO: 2177 - RNA, 21 nt, Artificial Sequence
  Description of Artificial Sequence:  inverted control/siNA sense
  misc_feature (1)..(1): 2'-deoxy-2'-fluoro
  misc_feature (3)..(10): 2'-deoxy-2'-fluoro
  misc_feature (16)..(17): 2'-deoxy-2'-fluoro
  misc_feature (19)..(19): 2'-deoxy-2'-fluoro
  misc_feature (20)..(21): n stands for thymidine
  misc_feature (20)..(20): Phosphorothioate 3'-Internucleotide Linkage
cguuccucccggagacuacnn

SEQ ID NO: 2178 - RNA, 21 nt, Artificial Sequence
  Description of Artificial Sequence:  inverted control/siNA sense
  misc_feature (4)..(11): 2'-deoxy-2'-fluoro
  misc_feature (14)..(17): 2'-deoxy-2'-fluoro
  misc_feature (20)..(21): n stands for thymidine
  misc_feature (20)..(20): Phosphorothioate 3'-Internucleotide Linkage
ggaccuuucuuaguuuuggnn

SEQ ID NO: 2179 - RNA, 21 nt, Artificial Sequence
  Description of Artificial Sequence:  inverted control/siNA sense
  misc_feature (1)..(3): 2'-deoxy-2'-fluoro
  misc_feature (1)..(1): 5'-3 attached terminal deoxyabasic moeity
  misc_feature (4)..(4): 2'-deoxy
  misc_feature (5)..(5): 2'-deoxy-2'-fluoro
  misc_feature (6)..(11): 2'-deoxy
  misc_feature (12)..(14): 2'-deoxy-2'-fluoro
  misc_feature (15)..(17): 2'-deoxy
  misc_feature (18)..(19): 2'-deoxy-2'-fluoro
  misc_feature (20)..(21): n stands for thymidine
  misc_feature (21)..(21): 3'-3 attached terminal deoxyabasic moeity
cccacggaaaauuugagucnn

SEQ ID NO: 2180 - RNA, 21 nt, Artificial Sequence
  Description of Artificial Sequence:  inverted control/siNA sense
  misc_feature (1)..(1): 2'-deoxy
  misc_feature (1)..(1): 5'-3 attached terminal deoxyabasic moeity
  misc_feature (2)..(2): 2'-deoxy-2'-fluoro
  misc_feature (3)..(4): 2'-deoxy
  misc_feature (5)..(9): 2'-deoxy-2'-fluoro
  misc_feature (10)..(17): 2'-deoxy
  misc_feature (18)..(18): 2'-deoxy-2'-fluoro
  misc_feature (19)..(19): 2'-deoxy
  misc_feature (20)..(21): n stands for thymidine
  misc_feature (21)..(21): 3'-3 attached terminal deoxyabasic moeity
guagucuccgggaggaacgnn

SEQ ID NO: 2181 - RNA, 21 nt, Artificial Sequence
  Description of Artificial Sequence:  inverted control/siNA sense
  misc_feature (1)..(2): 2'-deoxy-2'-fluoro
  misc_feature (1)..(1): 5'-3 attached terminal deoxyabasic moeity
  misc_feature (3)..(6): 2'-deoxy
  misc_feature (7)..(8): 2'-deoxy-2'-fluoro
  misc_feature (9)..(16): 2'-deoxy
  misc_feature (17)..(19): 2'-deoxy-2'-fluoro
  misc_feature (20)..(21): n stands for thymidine
  misc_feature (21)..(21): 3'-3 attached terminal deoxyabasic moeity
ccaaaacuaagaaagguccnn

SEQ ID NO: 2182 - RNA, 21 nt, Artificial Sequence
  Description of Artificial Sequence:  inverted control/siNA sense
  misc_feature (3)..(5): 2'-deoxy-2'-fluoro
  misc_feature (9)..(14): 2'-deoxy-2'-fluoro
  misc_feature (16)..(16): 2'-deoxy-2'-fluoro
  misc_feature (20)..(21): n stands for thymidine
  misc_feature (20)..(20): Phosphorothioate 3'-Internucleotide Linkage
gacucaaauuuuccgugggnn

SEQ ID NO: 2183 - RNA, 21 nt, Artificial Sequence
  Description of Artificial Sequence:  inverted control/siNA sense
  misc_feature (1)..(1): 2'-deoxy-2'-fluoro
  misc_feature (3)..(10): 2'-deoxy-2'-fluoro
  misc_feature (16)..(17): 2'-deoxy-2'-fluoro
  misc_feature (19)..(19): 2'-deoxy-2'-fluoro
  misc_feature (20)..(21): n stands for thymidine
  misc_feature (20)..(20): Phosphorothioate 3'-Internucleotide Linkage
cguuccucccggagacuacnn

SEQ ID NO: 2184 - RNA, 21 nt, Artificial Sequence
  Description of Artificial Sequence:  inverted control/siNA sense
  misc_feature (4)..(11): 2'-deoxy-2'-fluoro
  misc_feature (14)..(17): 2'-deoxy-2'-fluoro
  misc_feature (20)..(21): n stands for thymidine
  misc_feature (20)..(20): Phosphorothioate 3'-Internucleotide Linkage
ggaccuuucuuaguuuuggnn

SEQ ID NO: 2185 - RNA, 21 nt, Artificial Sequence
  Description of Artificial Sequence:  siNA sense region
  misc_feature (1)..(1): 5'-3 attached terminal deoxyabasic moeity
  misc_feature (20)..(21): n stands for thymidine
  misc_feature (21)..(21): 3'-3 attached terminal deoxyabasic moeity
cugaguuuaaaaggcacccnn

SEQ ID NO: 2186 - RNA, 21 nt, Artificial Sequence
  Description of Artificial Sequence:  siNA sense region
  misc_feature (1)..(1): 5'-3 attached terminal deoxyabasic moeity
  misc_feature (20)..(21): n stands for thymidine
  misc_feature (21)..(21): 3'-3 attached terminal deoxyabasic moeity
gcaaggagggccucugaugnn

SEQ ID NO: 2187 - RNA, 21 nt, Artificial Sequence
  Description of Artificial Sequence:  siNA sense region
  misc_feature (1)..(1): 5'-3 attached terminal deoxyabasic moeity
  misc_feature (20)..(21): n stands for thymidine
  misc_feature (21)..(21): 3'-3 attached terminal deoxyabasic moeity
ccuggaaagaaucaaaaccnn

SEQ ID NO: 2188 - RNA, 21 nt, Artificial Sequence
  Description of Artificial Sequence:  siNA antisense region
  misc_feature (20)..(21): n stands for thymidine
  misc_feature (20)..(20): Phosphorothioate 3'-Internucleotide Linkage
gggugccuuuuaaacucagnn

SEQ ID NO: 2189 - RNA, 21 nt, Artificial Sequence
  Description of Artificial Sequence:  siNA antisense region
  misc_feature (20)..(21): n stands for thymidine
  misc_feature (20)..(20): Phosphorothioate 3'-Internucleotide Linkage
caucagaggcccuccuugcnn

SEQ ID NO: 2190 - RNA, 21 nt, Artificial Sequence
  Description of Artificial Sequence:  siNA antisense region
  misc_feature (20)..(21): n stands for thymidine
  misc_feature (20)..(20): Phosphorothioate 3'-Internucleotide Linkage
gguuuugauucuuuccaggnn

SEQ ID NO: 2191 - RNA, 21 nt, Artificial Sequence
  Description of Artificial Sequence:  inverted control/siNA sense
  misc_feature (1)..(1): 5'-3 attached terminal deoxyabasic moeity
  misc_feature (20)..(21): n stands for thymidine
  misc_feature (21)..(21): 3'-3 attached terminal deoxyabasic moeity
cccacggaaaauuugagucnn

SEQ ID NO: 2192 - RNA, 21 nt, Artificial Sequence
  Description of Artificial Sequence:  inverted control/siNA sense
  misc_feature (1)..(1): 5'-3 attached terminal deoxyabasic moeity
  misc_feature (20)..(21): n stands for thymidine
  misc_feature (21)..(21): 3'-3 attached terminal deoxyabasic moeity
guagucuccgggaggaacgnn

SEQ ID NO: 2193 - RNA, 21 nt, Artificial Sequence
  Description of Artificial Sequence:  inverted control/siNA sense
  misc_feature (1)..(1): 5'-3 attached terminal deoxyabasic moeity
  misc_feature (20)..(21): n stands for thymidine
  misc_feature (21)..(21): 3'-3 attached terminal deoxyabasic moeity
ccaaaacuaagaaagguccnn

SEQ ID NO: 2194 - RNA, 21 nt, Artificial Sequence
  Description of Artificial Sequence:  inverted control/siNA sense
  misc_feature (20)..(21): n stands for thymidine
  misc_feature (20)..(20): Phosphorothioate 3'-Internucleotide Linkage
gacucaaauuuuccgugggnn

SEQ ID NO: 2195 - RNA, 21 nt, Artificial Sequence
  Description of Artificial Sequence:  inverted control/siNA sense
  misc_feature (20)..(21): n stands for thymidine
  misc_feature (20)..(20): Phosphorothioate 3'-Internucleotide Linkage
cguuccucccggagacuacnn

SEQ ID NO: 2196 - RNA, 21 nt, Artificial Sequence
  Description of Artificial Sequence:  inverted control/siNA sense
  misc_feature (20)..(21): n stands for thymidine
  misc_feature (20)..(20): Phosphorothioate 3'-Internucleotide Linkage
ggaccuuucuuaguuuuggnn

SEQ ID NO: 2197 - RNA, 21 nt, Artificial Sequence
  Description of Artificial Sequence:  siNA antisense region
  misc_feature (1)..(2): 2'-deoxy-2'-fluoro
  misc_feature (3)..(3): 2'-deoxy
  misc_feature (4)..(5): 2'-deoxy-2'-fluoro
  misc_feature (6)..(6): 2'-deoxy
  misc_feature (7)..(7): 2'-deoxy-2'-fluoro
  misc_feature (8)..(8): 2'-deoxy
  misc_feature (9)..(12): 2'-deoxy-2'-fluoro
  misc_feature (13)..(13): 2'-deoxy
  misc_feature (14)..(14): 2'-deoxy-2'-fluoro
  misc_feature (15)..(16): 2'-deoxy
  misc_feature (17)..(18): 2'-deoxy-2'-fluoro
  misc_feature (19)..(19): 2'-deoxy
  misc_feature (20)..(21): n stands for 5-bromo-deoxy-uridine
  misc_feature (20)..(20): Phosphorothioate 3'-Internucleotide Linkage
uuguuguauuuugugguugnn

SEQ ID NO: 2198 - RNA, 21 nt, Artificial Sequence
  Description of Artificial Sequence:  siNA sense region
  misc_feature (1)..(1): 2'-deoxy-2'-fluoro
  misc_feature (2)..(2): 2'-deoxy
  misc_feature (3)..(4): 2'-deoxy-2'-fluoro
  misc_feature (5)..(9): 2'-deoxy
  misc_feature (10)..(17): 2'-deoxy-2'-fluoro
  misc_feature (18)..(18): 2'-deoxy
  misc_feature (19)..(19): 2'-deoxy-2'-fluoro
  misc_feature (20)..(21): n stands for 5-bromo-deoxy-uridine
  misc_feature (20)..(20): Phosphorothioate 3'-Internucleotide Linkage
caucagaggcccuccuugcnn

SEQ ID NO: 2199 - RNA, 21 nt, Artificial Sequence
  Description of Artificial Sequence:  siNA antisense region
  misc_feature (1)..(2): 2'-deoxy-2'-fluoro
  misc_feature (3)..(3): 2'-deoxy
  misc_feature (4)..(5): 2'-deoxy-2'-fluoro
  misc_feature (6)..(6): 2'-deoxy
  misc_feature (7)..(7): 2'-deoxy-2'-fluoro
  misc_feature (8)..(8): 2'-deoxy
  misc_feature (9)..(12): 2'-deoxy-2'-fluoro
  misc_feature (13)..(13): 2'-deoxy
  misc_feature (14)..(14): 2'-deoxy-2'-fluoro
  misc_feature (15)..(16): 2'-deoxy
  misc_feature (17)..(18): 2'-deoxy-2'-fluoro
  misc_feature (19)..(19): 2'-deoxy
  misc_feature (20)..(20): Phosphorothioate 3'-Internucleotide Linkage
  misc_feature (20)..(20): n stands for 5-bromo-deoxy-uridine
  misc_feature (21)..(21): n stands for thymidine
uuguuguauuuugugguugnn

SEQ ID NO: 2200 - RNA, 21 nt, Artificial Sequence
  Description of Artificial Sequence:  siNA sense region
  misc_feature (1)..(1): 2'-deoxy-2'-fluoro
  misc_feature (2)..(2): 2'-deoxy
  misc_feature (3)..(4): 2'-deoxy-2'-fluoro
  misc_feature (5)..(9): 2'-deoxy
  misc_feature (10)..(17): 2'-deoxy-2'-fluoro
  misc_feature (18)..(18): 2'-deoxy
  misc_feature (19)..(19): 2'-deoxy-2'-fluoro
  misc_feature (20)..(20): Phosphorothioate 3'-Internucleotide Linkage
  misc_feature (20)..(20): n stands for 5-bromo-deoxy-uridine
  misc_feature (21)..(21): n stands for thymidine
caucagaggcccuccuugcnn

SEQ ID NO: 2201 - RNA, 21 nt, Artificial Sequence
  Description of Artificial Sequence:  siNA sense region
  misc_feature (1)..(1): 5'-3 attached terminal deoxyabasic moeity
  misc_feature (20)..(21): n stands for thymidine
  misc_feature (21)..(21): 3'-3 attached terminal deoxyabasic moeity
caaccacaaaauacaacaann

SEQ ID NO: 2202 - RNA, 21 nt, Artificial Sequence
  Description of Artificial Sequence:  inverted control/siNA sense
  misc_feature (1)..(1): 5'-3 attached terminal deoxyabasic moeity
  misc_feature (20)..(21): n stands for thymidine
  misc_feature (21)..(21): 3'-3 attached terminal deoxyabasic moeity
aacaacauaaaacaccaacnn

SEQ ID NO: 2203 - RNA, 21 nt, Artificial Sequence
  Description of Artificial Sequence:  siNA antisense region
  misc_feature (20)..(21): n stands for thymidine
  misc_feature (20)..(20): Phosphorothioate 3'-Internucleotide Linkage
uuguuguauuuugugguugnn

SEQ ID NO: 2204 - RNA, 21 nt, Artificial Sequence
  Description of Artificial Sequence:  inverted control/siNA antisense
  misc_feature (20)..(21): n stands for thymidine
  misc_feature (20)..(20): Phosphorothioate 3'-Internucleotide Linkage
guugguguuuuauguuguunn

SEQ ID NO: 2205 - RNA, 21 nt, Artificial Sequence
  Description of Artificial Sequence:  siNA sense region
  misc_feature (1)..(3): 2'-deoxy-2'-fluoro
  misc_feature (1)..(1): 5'-3 attached terminal deoxyabasic moeity
  misc_feature (5)..(7): 2'-deoxy-2'-fluoro
  misc_feature (9)..(11): 2'-deoxy-2'-fluoro
  misc_feature (18)..(18): 2'-deoxy-2'-fluoro
  misc_feature (20)..(21): n stands for thymidine
  misc_feature (21)..(21): 3'-3 attached terminal deoxyabasic moeity
uccacuuaccugaggagcann

SEQ ID NO: 2206 - RNA, 21 nt, Artificial Sequence
  Description of Artificial Sequence:  siNA sense region
  misc_feature (1)..(1): 5'-3 attached terminal deoxyabasic moeity
  misc_feature (3)..(7): 2'-deoxy-2'-fluoro
  misc_feature (9)..(12): 2'-deoxy-2'-fluoro
  misc_feature (20)..(21): n stands for thymidine
  misc_feature (21)..(21): 3'-3 attached terminal deoxyabasic moeity
gguucuugccucagaagagnn

SEQ ID NO: 2207 - RNA, 21 nt, Artificial Sequence
  Description of Artificial Sequence:  siNA sense region
  misc_feature (1)..(1): 2'-deoxy-2'-fluoro
  misc_feature (1)..(1): 5'-3 attached terminal deoxyabasic moeity
  misc_feature (7)..(9): 2'-deoxy-2'-fluoro
  misc_feature (13)..(14): 2'-deoxy-2'-fluoro
  misc_feature (18)..(18): 2'-deoxy-2'-fluoro
  misc_feature (20)..(21): n stands for thymidine
  misc_feature (21)..(21): 3'-3 attached terminal deoxyabasic moeity
ugaaggcucaaaccagacann

SEQ ID NO: 2208 - RNA, 21 nt, Artificial Sequence
  Description of Artificial Sequence:  siNA antisense region
  misc_feature (1)..(1): 2'-deoxy-2'-fluoro
  misc_feature (3)..(8): 2'-deoxy-2'-fluoro
  misc_feature (12)..(12): 2'-deoxy-2'-fluoro
  misc_feature (16)..(16): 2'-deoxy-2'-fluoro
  misc_feature (20)..(21): n stands for thymidine
  misc_feature (20)..(20): Phosphorothioate 3'-Internucleotide Linkage
ugcuccucagguaaguggann

SEQ ID NO: 2209 - RNA, 21 nt, Artificial Sequence
  Description of Artificial Sequence:  siNA antisense region
  misc_feature (1)..(7): 2'-deoxy-2'-fluoro
  misc_feature (12)..(12): 2'-deoxy-2'-fluoro
  misc_feature (18)..(19): 2'-deoxy-2'-fluoro
  misc_feature (20)..(21): n stands for thymidine
  misc_feature (20)..(20): Phosphorothioate 3'-Internucleotide Linkage
cucuucugaggcaagaaccnn

SEQ ID NO: 2210 - RNA, 21 nt, Artificial Sequence
  Description of Artificial Sequence:  siNA antisense region
  misc_feature (1)..(1): 2'-deoxy-2'-fluoro
  misc_feature (3)..(5): 2'-deoxy-2'-fluoro
  misc_feature (8)..(10): 2'-deoxy-2'-fluoro
  misc_feature (14)..(18): 2'-deoxy-2'-fluoro
  misc_feature (20)..(21): n stands for thymidine
  misc_feature (20)..(20): Phosphorothioate 3'-Internucleotide Linkage
ugucugguuugagccuucann

SEQ ID NO: 2211 - RNA, 21 nt, Artificial Sequence
  Description of Artificial Sequence:  siNA sense region
  misc_feature (20)..(21): n stands for thymidine
uccacuuaccugaggagcann

SEQ ID NO: 2212 - RNA, 21 nt, Artificial Sequence
  Description of Artificial Sequence:  siNA sense region
  misc_feature (20)..(21): n stands for thymidine
gguucuugccucagaagagnn

SEQ ID NO: 2213 - RNA, 21 nt, Artificial Sequence
  Description of Artificial Sequence:  siNA sense region
  misc_feature (20)..(21): n stands for thymidine
ugaaggcucaaaccagacann

SEQ ID NO: 2214 - RNA, 21 nt, Artificial Sequence
  Description of Artificial Sequence:  siNA antisense region
  misc_feature (20)..(21): n stands for thymidine
ugcuccucagguaaguggann

SEQ ID NO: 2215 - RNA, 21 nt, Artificial Sequence
  Description of Artificial Sequence:  siNA antisense region
  misc_feature (20)..(21): n stands for thymidine
cucuucugaggcaagaaccnn

SEQ ID NO: 2216 - RNA, 21 nt, Artificial Sequence
  Description of Artificial Sequence:  siNA antisense region
  misc_feature (20)..(21): n stands for thymidine
ugucugguuugagccuucann

SEQ ID NO: 2217 - RNA, 21 nt, Artificial Sequence
  Description of Artificial Sequence:  siNA antisense region
  misc_feature (1)..(2): 2'-deoxy-2'-fluoro
  misc_feature (3)..(3): 2'-deoxy
  misc_feature (4)..(5): 2'-deoxy-2'-fluoro
  misc_feature (6)..(6): 2'-deoxy
  misc_feature (7)..(7): 2'-deoxy-2'-fluoro
  misc_feature (8)..(8): 2'-deoxy
  misc_feature (9)..(12): 2'-deoxy-2'-fluoro
  misc_feature (13)..(13): 2'-deoxy
  misc_feature (14)..(14): 2'-deoxy-2'-fluoro
  misc_feature (15)..(16): 2'-deoxy
  misc_feature (17)..(18): 2'-deoxy-2'-fluoro
  misc_feature (19)..(19): 2'-deoxy
  misc_feature (20)..(20): Phosphorothioate 3'-Internucleotide Linkage
  misc_feature (20)..(21): n stands for thymidine
uuguuguauuuugugguugnn

SEQ ID NO: 2218 - RNA, 21 nt, Artificial Sequence
  Description of Artificial Sequence:  siNA sense region
  misc_feature (1)..(1): 5'-3 attached terminal deoxyabasic moeity
  misc_feature (1)..(2): 2'-deoxy-2'-fluoro
  misc_feature (3)..(5): 2'-deoxy
  misc_feature (6)..(8): 2'-deoxy-2'-fluoro
  misc_feature (9)..(14): 2'-deoxy
  misc_feature (15)..(15): 2'-deoxy-2'-fluoro
  misc_feature (16)..(16): 2'-deoxy
  misc_feature (17)..(19): 2'-deoxy-2'-fluoro
  misc_feature (20)..(21): n stands for thymidine
  misc_feature (21)..(21): 3'-3 attached terminal deoxyabasic moeity
cugaguuuaaaaggcacccnn

SEQ ID NO: 2219 - RNA, 21 nt, Artificial Sequence
  Description of Artificial Sequence:  inverted control
  misc_feature (1)..(1): 5'-3 attached terminal deoxyabasic moeity
  misc_feature (1)..(3): 2'-deoxy-2'-fluoro
  misc_feature (4)..(4): 2'-deoxy
  misc_feature (5)..(5): 2'-deoxy-2'-fluoro
  misc_feature (6)..(11): 2'-deoxy
  misc_feature (12)..(14): 2'-deoxy-2'-fluoro
  misc_feature (15)..(17): 2'-deoxy
  misc_feature (18)..(19): 2'-deoxy-2'-fluoro
  misc_feature (20)..(21): n stands for thymidine
  misc_feature (21)..(21): 3'-3 attached terminal deoxyabasic moeity
cccacggaaaauuugagucnn

SEQ ID NO: 2220 - RNA, 21 nt, Artificial Sequence
  Description of Artificial Sequence:  siNA sense region
  misc_feature (1)..(1): 5'-3 attached terminal deoxyabasic moeity
  misc_feature (20)..(21): n stands for thymidine
  misc_feature (21)..(21): 3'-3 attached terminal deoxyabasic moeity
cugaguuuaaaaggcacccnn

SEQ ID NO: 2221 - RNA, 21 nt, Artificial Sequence
  Description of Artificial Sequence:  inverted control
  misc_feature (1)..(1): 5'-3 attached terminal deoxyabasic moeity
  misc_feature (20)..(21): n stands for thymidine
  misc_feature (21)..(21): 3'-3 attached terminal deoxyabasic moeity
cccacggaaaauuugagucnn

SEQ ID NO: 2222 - RNA, 21 nt, Artificial Sequence
  Description of Artificial Sequence:  siNA sense region
  misc_feature (1)..(1): 5'-3 attached terminal deoxyabasic moeity
  misc_feature (1)..(2): 2'-deoxy-2'-fluoro
  misc_feature (3)..(5): 2'-deoxy
  misc_feature (6)..(8): 2'-deoxy-2'-fluoro
  misc_feature (9)..(14): 2'-deoxy
  misc_feature (15)..(15): 2'-deoxy-2'-fluoro
  misc_feature (16)..(16): 2'-deoxy
  misc_feature (17)..(19): 2'-deoxy-2'-fluoro
  misc_feature (20)..(21): n stands for thymidine
  misc_feature (21)..(21): 3'-3 attached terminal deoxyabasic moeity
cugaguuuaaaaggcacccnn

SEQ ID NO: 2223 - RNA, 21 nt, Artificial Sequence
  Description of Artificial Sequence:  inverted control
  misc_feature (1)..(1): 5'-3 attached terminal deoxyabasic moeity
  misc_feature (1)..(3): 2'-deoxy-2'-fluoro
  misc_feature (4)..(4): 2'-deoxy
  misc_feature (5)..(5): 2'-deoxy-2'-fluoro
  misc_feature (6)..(11): 2'-deoxy
  misc_feature (12)..(14): 2'-deoxy-2'-fluoro
  misc_feature (15)..(17): 2'-deoxy
  misc_feature (18)..(19): 2'-deoxy-2'-fluoro
  misc_feature (20)..(21): n stands for thymidine
  misc_feature (21)..(21): 3'-3 attached terminal deoxyabasic moeity
cccacggaaaauuugagucnn

SEQ ID NO: 2224 - RNA, 21 nt, Artificial Sequence
  Description of Artificial Sequence:  siNA sense region
  misc_feature (1)..(1): 5'-3 attached terminal deoxyabasic moeity
  misc_feature (20)..(21): n stands for thymidine
  misc_feature (21)..(21): 3'-3 attached terminal deoxyabasic moeity
cugaguuuaaaaggcacccnn

SEQ ID NO: 2225 - RNA, 21 nt, Artificial Sequence
  Description of Artificial Sequence:  inverted control
  misc_feature (1)..(1): 5'-3 attached terminal deoxyabasic moeity
  misc_feature (20)..(21): n stands for thymidine
  misc_feature (21)..(21): 3'-3 attached terminal deoxyabasic moeity
cccacggaaaauuugagucnn

SEQ ID NO: 2226 - RNA, 21 nt, Artificial Sequence
  Description of Artificial Sequence:  siNA antisense region
  misc_feature (4)..(12): 2'-deoxy-2'-fluoro
  misc_feature (14)..(14): 2'-deoxy-2'-fluoro
  misc_feature (16)..(18): 2'-deoxy-2'-fluoro
  misc_feature (20)..(21): n stands for thymidine
  misc_feature (20)..(20): Phosphorothioate 3'-Internucleotide Linkage
gaauccucuuccaugcucann

SEQ ID NO: 2227 - RNA, 21 nt, Artificial Sequence
  Description of Artificial Sequence:  siNA antisense region
  misc_feature (2)..(3): 2'-deoxy-2'-fluoro
  misc_feature (6)..(10): 2'-deoxy-2'-fluoro
  misc_feature (12)..(13): 2'-deoxy-2'-fluoro
  misc_feature (15)..(15): 2'-deoxy-2'-fluoro
  misc_feature (17)..(18): 2'-deoxy-2'-fluoro
  misc_feature (20)..(20): Phosphorothioate 3'-Internucleotide Linkage
  misc_feature (20)..(21): n stands for thymidine
acugauuccugcuguguugnn

SEQ ID NO: 2228 - RNA, 21 nt, Artificial Sequence
  Description of Artificial Sequence:  siNA sense region
  misc_feature (1)..(1): 5'-3 attached terminal deoxyabasic moeity
  misc_feature (20)..(21): n stands for thymidine
  misc_feature (21)..(21): 3'-3 attached terminal deoxyabasic moeity
ugagcauggaagaggauucnn

SEQ ID NO: 2229 - RNA, 21 nt, Artificial Sequence
  Description of Artificial Sequence:  siNA sense region
  misc_feature (1)..(1): 5'-3 attached terminal deoxyabasic moeity
  misc_feature (20)..(21): n stands for thymidine
  misc_feature (21)..(21): 3'-3 attached terminal deoxyabasic moeity
caacacagcaggaaucagunn

SEQ ID NO: 2230 - RNA, 21 nt, Artificial Sequence
  Description of Artificial Sequence:  siNA antisense region
  misc_feature (20)..(21): n stands for thymidine
  misc_feature (20)..(20): Phosphorothioate 3'-Internucleotide Linkage
gaauccucuuccaugcucann

SEQ ID NO: 2231 - RNA, 21 nt, Artificial Sequence
  Description of Artificial Sequence:  siNA antisense region
  misc_feature (20)..(20): Phosphorothioate 3'-Internucleotide Linkage
  misc_feature (20)..(21): n stands for thymidine
acugauuccugcuguguugnn

SEQ ID NO: 2232 - RNA, 21 nt, Artificial Sequence
  Description of Artificial Sequence:  siNA sense region
  misc_feature (1)..(1): 5'-3 attached terminal deoxyabasic moeity
  misc_feature (1)..(3): 2'-deoxy-2'-fluoro
  misc_feature (13)..(13): 2'-deoxy-2'-fluoro
  misc_feature (15)..(15): 2'-deoxy-2'-fluoro
  misc_feature (19)..(19): 2'-deoxy-2'-fluoro
  misc_feature (20)..(21): n stands for thymidine
  misc_feature (21)..(21): 3'-3 attached terminal deoxyabasic moeity
cuuaggagaagguacgagunn

SEQ ID NO: 2233 - RNA, 21 nt, Artificial Sequence
  Description of Artificial Sequence:  siNA sense region
  misc_feature (1)..(1): 2'-deoxy-2'-fluoro
  misc_feature (1)..(1): 5'-3 attached terminal deoxyabasic moeity
  misc_feature (4)..(5): 2'-deoxy-2'-fluoro
  misc_feature (11)..(11): 2'-deoxy-2'-fluoro
  misc_feature (14)..(14): 2'-deoxy-2'-fluoro
  misc_feature (16)..(16): 2'-deoxy-2'-fluoro
  misc_feature (19)..(19): 2'-deoxy-2'-fluoro
  misc_feature (20)..(21): n stands for thymidine
  misc_feature (21)..(21): 3'-3 attached terminal deoxyabasic moeity
ugacuaaggacgacacaacnn

SEQ ID NO: 2234 - RNA, 21 nt, Artificial Sequence
  Description of Artificial Sequence:  siNA antisense region
  misc_feature (2)..(4): 2'-deoxy-2'-fluoro
  misc_feature (6)..(6): 2'-deoxy-2'-fluoro
  misc_feature (8)..(16): 2'-deoxy-2'-fluoro
  misc_feature (20)..(21): n stands for thymidine
  misc_feature (20)..(20): Phosphorothioate 3'-Internucleotide Linkage
acucguaccuucuccuaagnn

SEQ ID NO: 2235 - RNA, 21 nt, Artificial Sequence
  Description of Artificial Sequence:  siNA antisense region
  misc_feature (2)..(3): 2'-deoxy-2'-fluoro
  misc_feature (5)..(5): 2'-deoxy-2'-fluoro
  misc_feature (7)..(8): 2'-deoxy-2'-fluoro
  misc_feature (10)..(14): 2'-deoxy-2'-fluoro
  misc_feature (17)..(18): 2'-deoxy-2'-fluoro
  misc_feature (20)..(20): Phosphorothioate 3'-Internucleotide Linkage
  misc_feature (20)..(21): n stands for thymidine
guugugucguccuuagucann

SEQ ID NO: 2236 - RNA, 21 nt, Artificial Sequence
  Description of Artificial Sequence:  siNA sense region
  misc_feature (1)..(1): 5'-3 attached terminal deoxyabasic moeity
  misc_feature (1)..(3): 2'-deoxy-2'-fluoro
  misc_feature (13)..(13): 2'-deoxy-2'-fluoro
  misc_feature (15)..(15): 2'-deoxy-2'-fluoro
  misc_feature (19)..(19): 2'-deoxy-2'-fluoro
  misc_feature (20)..(21): n stands for thymidine
  misc_feature (21)..(21): 3'-3 attached terminal deoxyabasic moeity
cuuaggagaagguacgagunn

SEQ ID NO: 2237 - RNA, 21 nt, Artificial Sequence
  Description of Artificial Sequence:  siNA sense region
  misc_feature (1)..(1): 2'-deoxy-2'-fluoro
  misc_feature (1)..(1): 5'-3 attached terminal deoxyabasic moeity
  misc_feature (4)..(5): 2'-deoxy-2'-fluoro
  misc_feature (11)..(11): 2'-deoxy-2'-fluoro
  misc_feature (14)..(14): 2'-deoxy-2'-fluoro
  misc_feature (16)..(16): 2'-deoxy-2'-fluoro
  misc_feature (19)..(19): 2'-deoxy-2'-fluoro
  misc_feature (20)..(21): n stands for thymidine
  misc_feature (21)..(21): 3'-3 attached terminal deoxyabasic moeity
ugacuaaggacgacacaacnn

SEQ ID NO: 2238 - RNA, 21 nt, Artificial Sequence
  Description of Artificial Sequence:  siNA antisense region
  misc_feature (2)..(4): 2'-deoxy-2'-fluoro
  misc_feature (6)..(6): 2'-deoxy-2'-fluoro
  misc_feature (8)..(16): 2'-deoxy-2'-fluoro
  misc_feature (20)..(21): n stands for thymidine
  misc_feature (20)..(20): Phosphorothioate 3'-Internucleotide Linkage
acucguaccuucuccuaagnn

SEQ ID NO: 2239 - RNA, 21 nt, Artificial Sequence
  Description of Artificial Sequence:  siNA antisense region
  misc_feature (2)..(3): 2'-deoxy-2'-fluoro
  misc_feature (5)..(5): 2'-deoxy-2'-fluoro
  misc_feature (7)..(8): 2'-deoxy-2'-fluoro
  misc_feature (10)..(14): 2'-deoxy-2'-fluoro
  misc_feature (17)..(18): 2'-deoxy-2'-fluoro
  misc_feature (20)..(20): Phosphorothioate 3'-Internucleotide Linkage
  misc_feature (20)..(21): n stands for thymidine
guugugucguccuuagucann

SEQ ID NO: 2240 - RNA, 21 nt, Artificial Sequence
  Description of Artificial Sequence:  siNA sense region
  misc_feature (1)..(1): 5'-3 attached terminal deoxyabasic moeity
  misc_feature (20)..(21): n stands for thymidine
  misc_feature (21)..(21): 3'-3 attached terminal deoxyabasic moeity
cuuaggagaagguacgagunn

SEQ ID NO: 2241 - RNA, 21 nt, Artificial Sequence
  Description of Artificial Sequence:  siNA sense region
  misc_feature (1)..(1): 5'-3 attached terminal deoxyabasic moeity
  misc_feature (20)..(21): n stands for thymidine
  misc_feature (21)..(21): 3'-3 attached terminal deoxyabasic moeity
ugacuaaggacgacacaacnn

SEQ ID NO: 2242 - RNA, 21 nt, Artificial Sequence
  Description of Artificial Sequence:  siNA antisense region
  misc_feature (20)..(21): n stands for thymidine
  misc_feature (20)..(20): Phosphorothioate 3'-Internucleotide Linkage
acucguaccuucuccuaagnn

SEQ ID NO: 2243 - RNA, 21 nt, Artificial Sequence
  Description of Artificial Sequence:  siNA antisense region
  misc_feature (20)..(20): Phosphorothioate 3'-Internucleotide Linkage
  misc_feature (20)..(21): n stands for thymidine
guugugucguccuuagucann

SEQ ID NO: 2244 - RNA, 19 nt, Artificial Sequence
  Description of Artificial Sequence:  Target Sequence/siNA sense region
caugcuggacugcuggcac

SEQ ID NO: 2245 - RNA, 19 nt, Artificial Sequence
  Description of Artificial Sequence:  Target Sequence/siNA sense region
augcuggacugcuggcaca

SEQ ID NO: 2246 - RNA, 19 nt, Artificial Sequence
  Description of Artificial Sequence:  Target Sequence/siNA sense region
ugcuggacugcuggcacag

SEQ ID NO: 2247 - RNA, 23 nt, Artificial Sequence
  Description of Artificial Sequence:  Target Sequence/siNA sense region
cugaacugaguuuaaaaggcacc

SEQ ID NO: 2248 - RNA, 23 nt, Artificial Sequence
  Description of Artificial Sequence:  Target Sequence/siNA sense region
ugaacugaguuuaaaaggcaccc

SEQ ID NO: 2249 - RNA, 23 nt, Artificial Sequence
  Description of Artificial Sequence:  Target Sequence/siNA sense region
gaacugaguuuaaaaggcaccca

SEQ ID NO: 2250 - RNA, 23 nt, Artificial Sequence
  Description of Artificial Sequence:  Target Sequence/siNA sense region
acugaguuuaaaaggcacccagc

SEQ ID NO: 2251 - RNA, 23 nt, Artificial Sequence
  Description of Artificial Sequence:  Target Sequence/siNA sense region
cugaguuuaaaaggcacccagca

SEQ ID NO: 2252 - RNA, 23 nt, Artificial Sequence
  Description of Artificial Sequence:  Target Sequence/siNA sense region
ugaguuuaaaaggcacccagcac

SEQ ID NO: 2253 - RNA, 23 nt, Artificial Sequence
  Description of Artificial Sequence:  Target Sequence/siNA sense region
gaguuuaaaaggcacccagcaca

SEQ ID NO: 2254 - RNA, 24 nt, Artificial Sequence
  Description of Artificial Sequence:  Target Sequence/siNA sense region
aguuuaaaaggcacccagcacauc

SEQ ID NO: 2255 - RNA, 23 nt, Artificial Sequence
  Description of Artificial Sequence:  Target Sequence/siNA sense region
gcauauauaugauaaagcauuca

SEQ ID NO: 2256 - RNA, 19 nt, Artificial Sequence
  Description of Artificial Sequence:  Target Sequence/siNA sense region
ccuuaugaugccagcaaau

SEQ ID NO: 2257 - RNA, 19 nt, Artificial Sequence
  Description of Artificial Sequence:  Target Sequence/siNA sense region
cuuaugaugccagcaaaug

SEQ ID NO: 2258 - RNA, 19 nt, Artificial Sequence
  Description of Artificial Sequence:  Target Sequence/siNA sense region
uuaugaugccagcaaaugg

SEQ ID NO: 2259 - RNA, 19 nt, Artificial Sequence
  Description of Artificial Sequence:  Target Sequence/siNA sense region
uaugaugccagcaaauggg

SEQ ID NO: 2260 - RNA, 19 nt, Artificial Sequence
  Description of Artificial Sequence:  Target Sequence/siNA sense region
augaugccagcaaauggga

SEQ ID NO: 2261 - RNA, 19 nt, Artificial Sequence
  Description of Artificial Sequence:  Target Sequence/siNA sense region
cagaccaugcuggacugcu

SEQ ID NO: 2262 - RNA, 19 nt, Artificial Sequence
  Description of Artificial Sequence:  Target Sequence/siNA sense region
agaccaugcuggacugcug

SEQ ID NO: 2263 - RNA, 19 nt, Artificial Sequence
  Description of Artificial Sequence:  Target Sequence/siNA sense region
gaccaugcuggacugcugg

SEQ ID NO: 2264 - RNA, 19 nt, Artificial Sequence
  Description of Artificial Sequence:  Target Sequence/siNA sense region
accaugcuggacugcuggc

SEQ ID NO: 2265 - RNA, 19 nt, Artificial Sequence
  Description of Artificial Sequence:  Target Sequence/siNA sense region
ccaugcuggacugcuggca

SEQ ID NO: 2266 - RNA, 19 nt, Artificial Sequence
  Description of Artificial Sequence:  Target Sequence/siNA sense region
caggauggcaaagacuaca

SEQ ID NO: 2267 - RNA, 19 nt, Artificial Sequence
  Description of Artificial Sequence:  Target Sequence/siNA sense region
aggauggcaaagacuacau

SEQ ID NO: 2268 - RNA, 23 nt, Artificial Sequence
  Description of Artificial Sequence:  Target Sequence/siNA sense region
aacagaauuuccugggacagcaa

SEQ ID NO: 2269 - RNA, 23 nt, Artificial Sequence
  Description of Artificial Sequence:  Target Sequence/siNA sense region
uggagcaucucaucuguuacagc

SEQ ID NO: 2270 - RNA, 23 nt, Artificial Sequence
  Description of Artificial Sequence:  Target Sequence/siNA sense region
cacguuuucagaguugguggaac

SEQ ID NO: 2271 - RNA, 23 nt, Artificial Sequence
  Description of Artificial Sequence:  Target Sequence/siNA sense region
cucaccuguuuccuguauggagg

SEQ ID NO: 2272 - RNA, 23 nt, Artificial Sequence
  Description of Artificial Sequence:  Target Sequence/siNA sense region
acuucuaugugaccaccaucccc

SEQ ID NO: 2273 - RNA, 23 nt, Artificial Sequence
  Description of Artificial Sequence:  Target Sequence/siNA sense region
caagcacugccacaagaaguacc

SEQ ID NO: 2274 - RNA, 23 nt, Artificial Sequence
  Description of Artificial Sequence:  Target Sequence/siNA sense region
aguacggcaaccucuccaacuuc

SEQ ID NO: 2275 - RNA, 21 nt, Artificial Sequence
  Description of Artificial Sequence:  siNA sense region
  misc_feature (20)..(21): n stands for thymidine
caugcuggacugcuggcacnn

SEQ ID NO: 2276 - RNA, 21 nt, Artificial Sequence
  Description of Artificial Sequence:  siNA sense region
  misc_feature (20)..(21): n stands for thymidine
augcuggacugcuggcacann

SEQ ID NO: 2277 - RNA, 21 nt, Artificial Sequence
  Description of Artificial Sequence:  siNA sense region
  misc_feature (20)..(21): n stands for thymidine
ugcuggacugcuggcacagnn

SEQ ID NO: 2278 - RNA, 21 nt, Artificial Sequence
  Description of Artificial Sequence:  siNA antisense region
  misc_feature (20)..(21): n stands for thymidine
gugccagcaguccagcaugnn

SEQ ID NO: 2279 - RNA, 21 nt, Artificial Sequence
  Description of Artificial Sequence:  siNA antisense region
  misc_feature (20)..(21): n stands for thymidine
ugugccagcaguccagcaunn

SEQ ID NO: 2280 - RNA, 21 nt, Artificial Sequence
  Description of Artificial Sequence:  siNA antisense region
  misc_feature (20)..(21): n stands for thymidine
cugugccagcaguccagcann

SEQ ID NO: 2281 - RNA, 21 nt, Artificial Sequence
  Description of Artificial Sequence:  siNA sense region
  misc_feature (1)..(1): 5'-3 attached terminal deoxyabasic moeity
  misc_feature (3)..(5): 2'-O-methyl
  misc_feature (9)..(14): 2'-O-methyl
  misc_feature (16)..(16): 2'-O-methyl
  misc_feature (20)..(21): n stands for thymidine
cugaguuuaaaaggcacccnn

SEQ ID NO: 2282 - RNA, 21 nt, Artificial Sequence
  Description of Artificial Sequence:  siNA sense region
  misc_feature (1)..(1): 5'-3 attached terminal deoxyabasic moeity
  misc_feature (1)..(2): 2'-deoxy-2'-fluoro
  misc_feature (6)..(8): 2'-deoxy-2'-fluoro
  misc_feature (15)..(15): 2'-deoxy-2'-fluoro
  misc_feature (17)..(19): 2'-deoxy-2'-fluoro
  misc_feature (20)..(21): n stands for thymidine
  misc_feature (21)..(21): 3'-3 attached terminal deoxyabasic moeity
cugaguuuaaaaggcacccnn

SEQ ID NO: 2283 - RNA, 21 nt, Artificial Sequence
  Description of Artificial Sequence:  siNA sense region
  misc_feature (1)..(1): 5'-3 attached terminal deoxyabasic moeity
  misc_feature (4)..(4): 2'-O-methyl
  misc_feature (6)..(11): 2'-O-methyl
  misc_feature (15)..(17): 2'-O-methyl
  misc_feature (20)..(21): n stands for thymidine
  misc_feature (21)..(21): 3'-3 attached terminal deoxyabasic moeity
cccacggaaaauuugagucnn

SEQ ID NO: 2284 - RNA, 21 nt, Artificial Sequence
  Description of Artificial Sequence:  siNA sense region
  misc_feature (1)..(1): 5'-3 attached terminal deoxyabasic moeity
  misc_feature (1)..(3): 2'-deoxy-2'-fluoro
  misc_feature (5)..(5): 2'-deoxy-2'-fluoro
  misc_feature (12)..(14): 2'-deoxy-2'-fluoro
  misc_feature (18)..(19): 2'-deoxy-2'-fluoro
  misc_feature (20)..(21): n stands for thymidine
  misc_feature (21)..(21): 3'-3 attached terminal deoxyabasic moeity
cccacggaaaauuugagucnn

SEQ ID NO: 2285 - RNA, 21 nt, Artificial Sequence
  Description of Artificial Sequence:  siNA sense region
  misc_feature (1)..(1): 5'-3 attached terminal deoxyabasic moeity
  misc_feature (20)..(21): n stands for thymidine
  misc_feature (21)..(21): 3'-3 attached terminal deoxyabasic moeity
gaacugaguuuaaaaggcann

SEQ ID NO: 2286 - RNA, 21 nt, Artificial Sequence
  Description of Artificial Sequence:  siNA sense region
  misc_feature (1)..(1): 5'-3 attached terminal deoxyabasic moeity
  misc_feature (20)..(21): n stands for thymidine
  misc_feature (21)..(21): 3'-3 attached terminal deoxyabasic moeity
aacugaguuuaaaaggcacnn

SEQ ID NO: 2287 - RNA, 21 nt, Artificial Sequence
  Description of Artificial Sequence:  siNA sense region
  misc_feature (1)..(1): 5'-3 attached terminal deoxyabasic moeity
  misc_feature (20)..(21): n stands for thymidine
  misc_feature (21)..(21): 3'-3 attached terminal deoxyabasic moeity
acugaguuuaaaaggcaccnn

SEQ ID NO: 2288 - RNA, 21 nt, Artificial Sequence
  Description of Artificial Sequence:  siNA sense region
  misc_feature (1)..(1): 5'-3 attached terminal deoxyabasic moeity
  misc_feature (20)..(21): n stands for thymidine
  misc_feature (21)..(21): 3'-3 attached terminal deoxyabasic moeity
ugaguuuaaaaggcacccann

SEQ ID NO: 2289 - RNA, 21 nt, Artificial Sequence
  Description of Artificial Sequence:  siNA sense region
  misc_feature (1)..(1): 5'-3 attached terminal deoxyabasic moeity
  misc_feature (20)..(21): n stands for thymidine
  misc_feature (21)..(21): 3'-3 attached terminal deoxyabasic moeity
gaguuuaaaaggcacccagnn

SEQ ID NO: 2290 - RNA, 21 nt, Artificial Sequence
  Description of Artificial Sequence:  siNA sense region
  misc_feature (1)..(1): 5'-3 attached terminal deoxyabasic moeity
  misc_feature (20)..(21): n stands for thymidine
  misc_feature (21)..(21): 3'-3 attached terminal deoxyabasic moeity
aguuuaaaaggcacccagcnn

SEQ ID NO: 2291 - RNA, 21 nt, Artificial Sequence
  Description of Artificial Sequence:  siNA sense region
  misc_feature (1)..(1): 5'-3 attached terminal deoxyabasic moeity
  misc_feature (20)..(21): n stands for thymidine
  misc_feature (21)..(21): 3'-3 attached terminal deoxyabasic moeity
guuuaaaaggcacccagcann

SEQ ID NO: 2292 - RNA, 21 nt, Artificial Sequence
  Description of Artificial Sequence:  siNA antisense region
  misc_feature (20)..(21): n stands for thymidine
  misc_feature (20)..(20): Phosphorothioate 3'-Internucleotide Linkage
ugccuuuuaaacucaguucnn

SEQ ID NO: 2293 - RNA, 21 nt, Artificial Sequence
  Description of Artificial Sequence:  siNA antisense region
  misc_feature (20)..(20): Phosphorothioate 3'-Internucleotide Linkage
  misc_feature (20)..(21): n stands for thymidine
gugccuuuuaaacucaguunn

SEQ ID NO: 2294 - RNA, 21 nt, Artificial Sequence
  Description of Artificial Sequence:  siNA antisense region
  misc_feature (20)..(21): n stands for thymidine
  misc_feature (20)..(20): Phosphorothioate 3'-Internucleotide Linkage
ggugccuuuuaaacucagunn

SEQ ID NO: 2295 - RNA, 21 nt, Artificial Sequence
  Description of Artificial Sequence:  siNA antisense region
  misc_feature (20)..(20): Phosphorothioate 3'-Internucleotide Linkage
  misc_feature (20)..(21): n stands for thymidine
ugggugccuuuuaaacucann

SEQ ID NO: 2296 - RNA, 21 nt, Artificial Sequence
  Description of Artificial Sequence:  siNA antisense region
  misc_feature (20)..(21): n stands for thymidine
  misc_feature (20)..(20): Phosphorothioate 3'-Internucleotide Linkage
cugggugccuuuuaaacucnn

SEQ ID NO: 2297 - RNA, 21 nt, Artificial Sequence
  Description of Artificial Sequence:  siNA antisense region
  misc_feature (20)..(20): Phosphorothioate 3'-Internucleotide Linkage
  misc_feature (20)..(21): n stands for thymidine
gcugggugccuuuuaaacunn

SEQ ID NO: 2298 - RNA, 21 nt, Artificial Sequence
  Description of Artificial Sequence:  siNA antisense region
  misc_feature (20)..(21): n stands for thymidine
  misc_feature (20)..(20): Phosphorothioate 3'-Internucleotide Linkage
ugcugggugccuuuuaaacnn

SEQ ID NO: 2299 - RNA, 21 nt, Artificial Sequence
  Description of Artificial Sequence:  siNA sense region
  misc_feature (1)..(1): 5'-3 attached terminal deoxyabasic moeity
  misc_feature (20)..(21): n stands for thymidine
  misc_feature (21)..(21): 3'-3 attached terminal deoxyabasic moeity
acggaaaauuugagucaagnn

SEQ ID NO: 2300 - RNA, 21 nt, Artificial Sequence
  Description of Artificial Sequence:  siNA sense region
  misc_feature (1)..(1): 5'-3 attached terminal deoxyabasic moeity
  misc_feature (20)..(21): n stands for thymidine
  misc_feature (21)..(21): 3'-3 attached terminal deoxyabasic moeity
cacggaaaauuugagucaann

SEQ ID NO: 2301 - RNA, 21 nt, Artificial Sequence
  Description of Artificial Sequence:  siNA sense region
  misc_feature (1)..(1): 5'-3 attached terminal deoxyabasic moeity
  misc_feature (20)..(21): n stands for thymidine
  misc_feature (21)..(21): 3'-3 attached terminal deoxyabasic moeity
ccacggaaaauuugagucann

SEQ ID NO: 2302 - RNA, 21 nt, Artificial Sequence
  Description of Artificial Sequence:  siNA sense region
  misc_feature (1)..(1): 5'-3 attached terminal deoxyabasic moeity
  misc_feature (20)..(21): n stands for thymidine
  misc_feature (21)..(21): 3'-3 attached terminal deoxyabasic moeity
acccacggaaaauuugagunn

SEQ ID NO: 2303 - RNA, 21 nt, Artificial Sequence
  Description of Artificial Sequence:  siNA sense region
  misc_feature (1)..(1): 5'-3 attached terminal deoxyabasic moeity
  misc_feature (20)..(21): n stands for thymidine
  misc_feature (21)..(21): 3'-3 attached terminal deoxyabasic moeity
gacccacggaaaauuugagnn

SEQ ID NO: 2304 - RNA, 21 nt, Artificial Sequence
  Description of Artificial Sequence:  siNA sense region
  misc_feature (1)..(1): 5'-3 attached terminal deoxyabasic moeity
  misc_feature (20)..(21): n stands for thymidine
  misc_feature (21)..(21): 3'-3 attached terminal deoxyabasic moeity
cgacccacggaaaauuugann

SEQ ID NO: 2305 - RNA, 21 nt, Artificial Sequence
  Description of Artificial Sequence:  siNA sense region
  misc_feature (1)..(1): 5'-3 attached terminal deoxyabasic moeity
  misc_feature (20)..(21): n stands for thymidine
  misc_feature (21)..(21): 3'-3 attached terminal deoxyabasic moeity
acgacccacggaaaauuugnn

SEQ ID NO: 2306 - RNA, 21 nt, Artificial Sequence
  Description of Artificial Sequence:  siNA antisense region
  misc_feature (20)..(21): n stands for thymidine
  misc_feature (20)..(20): Phosphorothioate 3'-Internucleotide Linkage
cuugacucaaauuuuccgunn

SEQ ID NO: 2307 - RNA, 21 nt, Artificial Sequence
  Description of Artificial Sequence:  siNA antisense region
  misc_feature (20)..(20): Phosphorothioate 3'-Internucleotide Linkage
  misc_feature (20)..(21): n stands for thymidine
uugacucaaauuuuccgugnn

SEQ ID NO: 2308 - RNA, 21 nt, Artificial Sequence
  Description of Artificial Sequence:  siNA antisense region
  misc_feature (20)..(21): n stands for thymidine
  misc_feature (20)..(20): Phosphorothioate 3'-Internucleotide Linkage
ugacucaaauuuuccguggnn

SEQ ID NO: 2309 - RNA, 21 nt, Artificial Sequence
  Description of Artificial Sequence:  siNA antisense region
  misc_feature (20)..(20): Phosphorothioate 3'-Internucleotide Linkage
  misc_feature (20)..(21): n stands for thymidine
acucaaauuuuccgugggunn

SEQ ID NO: 2310 - RNA, 21 nt, Artificial Sequence
  Description of Artificial Sequence:  siNA antisense region
  misc_feature (20)..(21): n stands for thymidine
  misc_feature (20)..(20): Phosphorothioate 3'-Internucleotide Linkage
cucaaauuuuccgugggucnn

SEQ ID NO: 2311 - RNA, 21 nt, Artificial Sequence
  Description of Artificial Sequence:  siNA antisense region
  misc_feature (20)..(20): Phosphorothioate 3'-Internucleotide Linkage
  misc_feature (20)..(21): n stands for thymidine
ucaaauuuuccgugggucgnn

SEQ ID NO: 2312 - RNA, 21 nt, Artificial Sequence
  Description of Artificial Sequence:  siNA sense region
  misc_feature (20)..(21): n stands for thymidine
  misc_feature (20)..(20): Phosphorothioate 3'-Internucleotide Linkage
caaauuuuccgugggucgunn

SEQ ID NO: 2313 - RNA, 19 nt, Artificial Sequence
  Description of Artificial Sequence:  siNA antisense region
  misc_feature (20)..(20): Phosphorothioate 3'-Internucleotide Linkage
  misc_feature (20)..(20): X stands for nitroindole universal base
gggugccuuuuaaacucag

SEQ ID NO: 2314 - RNA, 28 nt, Artificial Sequence
  Description of Artificial Sequence:  siNA antisense region
  misc_feature (1)..(1): 5'-3 attached terminal phosphate
  misc_feature (28)..(28): 3'-3 attached terminal deoxyabasic moeity
gggugccuuuuaaacucgaguuuaaaag

SEQ ID NO: 2315 - RNA, 30 nt, Artificial Sequence
  Description of Artificial Sequence:  siNA antisense region
  misc_feature (1)..(1): 5'-3 attached terminal phosphate
  misc_feature (30)..(30): 3'-3 attached terminal deoxyabasic moeity
gggugccuuuuaaacucaggaguuuaaaag

SEQ ID NO: 2316 - RNA, 32 nt, Artificial Sequence
  Description of Artificial Sequence:  siNA antisense region
  misc_feature (1)..(1): 5'-3 attached terminal phosphate
  misc_feature (32)..(32): 3'-3 attached terminal deoxyabasic moeity
caucagaggcccuccuugcaaggagggccucu

SEQ ID NO: 2317 - RNA, 31 nt, Artificial Sequence
  Description of Artificial Sequence:  siNA antisense region
  misc_feature (1)..(1): 5'-3 attached terminal phosphate
  misc_feature (31)..(31): 3'-3 attached terminal deoxyabasic moeity
caucagaggcccuccuuaaggagggccucug

SEQ ID NO: 2318 - RNA, 29 nt, Artificial Sequence
  Description of Artificial Sequence:  siNA antisense region
  misc_feature (1)..(1): 5'-3 attached terminal phosphate
  misc_feature (29)..(29): 3'-3 attached terminal deoxyabasic moeity
caucagaggcccuccuaggagggccucug

SEQ ID NO: 2319 - RNA, 21 nt, Artificial Sequence
  Description of Artificial Sequence:  siNA sense region
  misc_feature (1)..(1): 5'-3 attached terminal deoxyabasic moeity
  misc_feature (4)..(5): 2'-deoxy-2'-fluoro
  misc_feature (9)..(11): 2'-deoxy-2'-fluoro
  misc_feature (18)..(18): 2'-deoxy-2'-fluoro
  misc_feature (20)..(21): n stands for thymidine
  misc_feature (21)..(21): 3'-3 attached terminal deoxyabasic moeity
gaacugaguuuaaaaggcann

SEQ ID NO: 2320 - RNA, 21 nt, Artificial Sequence
  Description of Artificial Sequence:  siNA sense region
  misc_feature (1)..(1): 5'-3 attached terminal deoxyabasic moeity
  misc_feature (3)..(4): 2'-deoxy-2'-fluoro
  misc_feature (8)..(10): 2'-deoxy-2'-fluoro
  misc_feature (17)..(17): 2'-deoxy-2'-fluoro
  misc_feature (19)..(19): 2'-deoxy-2'-fluoro
  misc_feature (20)..(21): n stands for thymidine
  misc_feature (21)..(21): 3'-3 attached terminal deoxyabasic moeity
aacugaguuuaaaaggcacnn

SEQ ID NO: 2321 - RNA, 21 nt, Artificial Sequence
  Description of Artificial Sequence:  siNA sense region
  misc_feature (1)..(1): 5'-3 attached terminal deoxyabasic moeity
  misc_feature (2)..(3): 2'-deoxy-2'-fluoro
  misc_feature (7)..(9): 2'-deoxy-2'-fluoro
  misc_feature (16)..(16): 2'-deoxy-2'-fluoro
  misc_feature (18)..(19): 2'-deoxy-2'-fluoro
  misc_feature (20)..(21): n stands for thymidine
  misc_feature (21)..(21): 3'-3 attached terminal deoxyabasic moeity
acugaguuuaaaaggcaccnn

SEQ ID NO: 2322 - RNA, 21 nt, Artificial Sequence
  Description of Artificial Sequence:  siNA sense region
  misc_feature (1)..(1): 5'-3 attached terminal deoxyabasic moeity
  misc_feature (1)..(1): 2'-deoxy-2'-fluoro
  misc_feature (5)..(7): 2'-deoxy-2'-fluoro
  misc_feature (14)..(14): 2'-deoxy-2'-fluoro
  misc_feature (16)..(18): 2'-deoxy-2'-fluoro
  misc_feature (20)..(21): n stands for thymidine
  misc_feature (21)..(21): 3'-3 attached terminal deoxyabasic moeity
ugaguuuaaaaggcacccann

SEQ ID NO: 2323 - RNA, 21 nt, Artificial Sequence
  Description of Artificial Sequence:  siNA sense region
  misc_feature (1)..(1): 5'-3 attached terminal deoxyabasic moeity
  misc_feature (4)..(6): 2'-deoxy-2'-fluoro
  misc_feature (13)..(13): 2'-deoxy-2'-fluoro
  misc_feature (15)..(17): 2'-deoxy-2'-fluoro
  misc_feature (20)..(21): n stands for thymidine
  misc_feature (21)..(21): 3'-3 attached terminal deoxyabasic moeity
gaguuuaaaaggcacccagnn

SEQ ID NO: 2324 - RNA, 21 nt, Artificial Sequence
  Description of Artificial Sequence:  siNA sense region
  misc_feature (1)..(1): 5'-3 attached terminal deoxyabasic moeity
  misc_feature (3)..(5): 2'-deoxy-2'-fluoro
  misc_feature (12)..(12): 2'-deoxy-2'-fluoro
  misc_feature (14)..(16): 2'-deoxy-2'-fluoro
  misc_feature (19)..(19): 2'-deoxy-2'-fluoro
  misc_feature (20)..(21): n stands for thymidine
  misc_feature (21)..(21): 3'-3 attached terminal deoxyabasic moeity
aguuuaaaaggcacccagcnn

SEQ ID NO: 2325 - RNA, 21 nt, Artificial Sequence
  Description of Artificial Sequence:  siNA sense region
  misc_feature (1)..(1): 5'-3 attached terminal deoxyabasic moeity
  misc_feature (2)..(4): 2'-deoxy-2'-fluoro
  misc_feature (11)..(11): 2'-deoxy-2'-fluoro
  misc_feature (13)..(15): 2'-deoxy-2'-fluoro
  misc_feature (18)..(18): 2'-deoxy-2'-fluoro
  misc_feature (20)..(21): n stands for thymidine
  misc_feature (21)..(21): 3'-3 attached terminal deoxyabasic moeity
guuuaaaaggcacccagcann

SEQ ID NO: 2326 - RNA, 21 nt, Artificial Sequence
  Description of Artificial Sequence:  siNA antisense region
  misc_feature (1)..(1): 2'-deoxy-2'-fluoro
  misc_feature (3)..(8): 2'-deoxy-2'-fluoro
  misc_feature (12)..(14): 2'-deoxy-2'-fluoro
  misc_feature (17)..(19): 2'-deoxy-2'-fluoro
  misc_feature (20)..(20): Phosphorothioate 3'-Internucleotide Linkage
  misc_feature (20)..(21): n stands for thymidine
ugccuuuuaaacucaguucnn

SEQ ID NO: 2327 - RNA, 21 nt, Artificial Sequence
  Description of Artificial Sequence:  siNA antisense region
  misc_feature (4)..(9): 2'-deoxy-2'-fluoro
  misc_feature (13)..(15): 2'-deoxy-2'-fluoro
  misc_feature (18)..(19): 2'-deoxy-2'-fluoro
  misc_feature (20)..(21): n stands for thymidine
  misc_feature (20)..(20): Phosphorothioate 3'-Internucleotide Linkage
gugccuuuuaaacucaguunn

SEQ ID NO: 2328 - RNA, 21 nt, Artificial Sequence
  Description of Artificial Sequence:  siNA antisense region
  misc_feature (3)..(3): 2'-deoxy-2'-fluoro
  misc_feature (5)..(10): 2'-deoxy-2'-fluoro
  misc_feature (14)..(16): 2'-deoxy-2'-fluoro
  misc_feature (19)..(19): 2'-deoxy-2'-fluoro
  misc_feature (20)..(20): Phosphorothioate 3'-Internucleotide Linkage
  misc_feature (20)..(21): n stands for thymidine
ggugccuuuuaaacucagunn

SEQ ID NO: 2329 - RNA, 21 nt, Artificial Sequence
  Description of Artificial Sequence:  siNA antisense region
  misc_feature (1)..(1): 2'-deoxy-2'-fluoro
  misc_feature (5)..(5): 2'-deoxy-2'-fluoro
  misc_feature (7)..(12): 2'-deoxy-2'-fluoro
  misc_feature (16)..(18): 2'-deoxy-2'-fluoro
  misc_feature (20)..(21): n stands for thymidine
  misc_feature (20)..(20): Phosphorothioate 3'-Internucleotide Linkage
ugggugccuuuuaaacucann

SEQ ID NO: 2330 - RNA, 21 nt, Artificial Sequence
  Description of Artificial Sequence:  siNA antisense region
  misc_feature (1)..(2): 2'-deoxy-2'-fluoro
  misc_feature (6)..(6): 2'-deoxy-2'-fluoro
  misc_feature (8)..(13): 2'-deoxy-2'-fluoro
  misc_feature (17)..(19): 2'-deoxy-2'-fluoro
  misc_feature (20)..(20): Phosphorothioate 3'-Internucleotide Linkage
  misc_feature (20)..(21): n stands for thymidine
cugggugccuuuuaaacucnn

SEQ ID NO: 2331 - RNA, 21 nt, Artificial Sequence
  Description of Artificial Sequence:  siNA antisense region
  misc_feature (2)..(3): 2'-deoxy-2'-fluoro
  misc_feature (7)..(7): 2'-deoxy-2'-fluoro
  misc_feature (9)..(14): 2'-deoxy-2'-fluoro
  misc_feature (18)..(19): 2'-deoxy-2'-fluoro
  misc_feature (20)..(21): n stands for thymidine
  misc_feature (20)..(20): Phosphorothioate 3'-Internucleotide Linkage
gcugggugccuuuuaaacunn

SEQ ID NO: 2332 - RNA, 21 nt, Artificial Sequence
  Description of Artificial Sequence:  siNA antisense region
  misc_feature (1)..(1): 2'-deoxy-2'-fluoro
  misc_feature (3)..(4): 2'-deoxy-2'-fluoro
  misc_feature (8)..(8): 2'-deoxy-2'-fluoro
  misc_feature (10)..(15): 2'-deoxy-2'-fluoro
  misc_feature (19)..(19): 2'-deoxy-2'-fluoro
  misc_feature (20)..(20): Phosphorothioate 3'-Internucleotide Linkage
  misc_feature (20)..(21): n stands for thymidine
ugcugggugccuuuuaaacnn

SEQ ID NO: 2333 - RNA, 21 nt, Artificial Sequence
  Description of Artificial Sequence:  siNA sense region
  misc_feature (1)..(1): 5'-3 attached terminal deoxyabasic moeity
  misc_feature (2)..(2): 2'-deoxy-2'-fluoro
  misc_feature (9)..(11): 2'-deoxy-2'-fluoro
  misc_feature (15)..(16): 2'-deoxy-2'-fluoro
  misc_feature (20)..(21): n stands for thymidine
  misc_feature (21)..(21): 3'-3 attached terminal deoxyabasic moeity
acggaaaauuugagucaagnn

SEQ ID NO: 2334 - RNA, 21 nt, Artificial Sequence
  Description of Artificial Sequence:  siNA sense region
  misc_feature (1)..(1): 2'-deoxy-2'-fluoro
  misc_feature (1)..(1): 5'-3 attached terminal deoxyabasic moeity
  misc_feature (3)..(3): 2'-deoxy-2'-fluoro
  misc_feature (10)..(12): 2'-deoxy-2'-fluoro
  misc_feature (16)..(17): 2'-deoxy-2'-fluoro
  misc_feature (20)..(21): n stands for thymidine
  misc_feature (21)..(21): 3'-3 attached terminal deoxyabasic moeity
cacggaaaauuugagucaann

SEQ ID NO: 2335 - RNA, 21 nt, Artificial Sequence
  Description of Artificial Sequence:  siNA sense region
  misc_feature (1)..(1): 5'-3 attached terminal deoxyabasic moeity
  misc_feature (1)..(2): 2'-deoxy-2'-fluoro
  misc_feature (4)..(4): 2'-deoxy-2'-fluoro
  misc_feature (11)..(13): 2'-deoxy-2'-fluoro
  misc_feature (17)..(18): 2'-deoxy-2'-fluoro
  misc_feature (20)..(21): n stands for thymidine
  misc_feature (21)..(21): 3'-3 attached terminal deoxyabasic moeity
ccacggaaaauuugagucann

SEQ ID NO: 2336 - RNA, 21 nt, Artificial Sequence
  Description of Artificial Sequence:  siNA sense region
  misc_feature (1)..(1): 5'-3 attached terminal deoxyabasic moeity
  misc_feature (2)..(4): 2'-deoxy-2'-fluoro
  misc_feature (6)..(6): 2'-deoxy-2'-fluoro
  misc_feature (13)..(15): 2'-deoxy-2'-fluoro
  misc_feature (19)..(19): 2'-deoxy-2'-fluoro
  misc_feature (20)..(21): n stands for thymidine
  misc_feature (21)..(21): 3'-3 attached terminal deoxyabasic moeity
acccacggaaaauuugagunn

SEQ ID NO: 2337 - RNA, 21 nt, Artificial Sequence
  Description of Artificial Sequence:  siNA sense region
  misc_feature (1)..(1): 5'-3 attached terminal deoxyabasic moeity
  misc_feature (3)..(5): 2'-deoxy-2'-fluoro
  misc_feature (7)..(7): 2'-deoxy-2'-fluoro
  misc_feature (14)..(16): 2'-deoxy-2'-fluoro
  misc_feature (20)..(21): n stands for thymidine
  misc_feature (21)..(21): 3'-3 attached terminal deoxyabasic moeity
gacccacggaaaauuugagnn

SEQ ID NO: 2338 - RNA, 21 nt, Artificial Sequence
  Description of Artificial Sequence:  siNA sense region
  misc_feature (1)..(1): 2'-deoxy-2'-fluoro
  misc_feature (1)..(1): 5'-3 attached terminal deoxyabasic moeity
  misc_feature (4)..(6): 2'-deoxy-2'-fluoro
  misc_feature (8)..(8): 2'-deoxy-2'-fluoro
  misc_feature (15)..(17): 2'-deoxy-2'-fluoro
  misc_feature (20)..(21): n stands for thymidine
  misc_feature (21)..(21): 3'-3 attached terminal deoxyabasic moeity
cgacccacggaaaauuugann

SEQ ID NO: 2339 - RNA, 21 nt, Artificial Sequence
  Description of Artificial Sequence:  siNA sense region
  misc_feature (1)..(1): 5'-3 attached terminal deoxyabasic moeity
  misc_feature (2)..(2): 2'-deoxy-2'-fluoro
  misc_feature (5)..(7): 2'-deoxy-2'-fluoro
  misc_feature (9)..(9): 2'-deoxy-2'-fluoro
  misc_feature (16)..(18): 2'-deoxy-2'-fluoro
  misc_feature (20)..(21): n stands for thymidine
  misc_feature (21)..(21): 3'-3 attached terminal deoxyabasic moeity
acgacccacggaaaauuugnn

SEQ ID NO: 2340 - RNA, 21 nt, Artificial Sequence
  Description of Artificial Sequence:  siNA antisense region
  misc_feature (1)..(3): 2'-deoxy-2'-fluoro
  misc_feature (6)..(8): 2'-deoxy-2'-fluoro
  misc_feature (12)..(17): 2'-deoxy-2'-fluoro
  misc_feature (19)..(19): 2'-deoxy-2'-fluoro
  misc_feature (20)..(20): Phosphorothioate 3'-Internucleotide Linkage
  misc_feature (20)..(21): n stands for thymidine
cuugacucaaauuuuccgunn

SEQ ID NO: 2341 - RNA, 21 nt, Artificial Sequence
  Description of Artificial Sequence:  siNA antisense region
  misc_feature (1)..(2): 2'-deoxy-2'-fluoro
  misc_feature (5)..(7): 2'-deoxy-2'-fluoro
  misc_feature (11)..(16): 2'-deoxy-2'-fluoro
  misc_feature (18)..(18): 2'-deoxy-2'-fluoro
  misc_feature (20)..(21): n stands for thymidine
  misc_feature (20)..(20): Phosphorothioate 3'-Internucleotide Linkage
uugacucaaauuuuccgugnn

SEQ ID NO: 2342 - RNA, 21 nt, Artificial Sequence
  Description of Artificial Sequence:  siNA antisense region
  misc_feature (1)..(1): 2'-deoxy-2'-fluoro
  misc_feature (4)..(6): 2'-deoxy-2'-fluoro
  misc_feature (10)..(15): 2'-deoxy-2'-fluoro
  misc_feature (17)..(17): 2'-deoxy-2'-fluoro
  misc_feature (20)..(20): 2'-deoxy-2'-fluoro
  misc_feature (20)..(21): n stands for thymidine
ugacucaaauuuuccguggnn

SEQ ID NO: 2343 - RNA, 21 nt, Artificial Sequence
  Description of Artificial Sequence:  siNA antisense region
  misc_feature (2)..(4): 2'-deoxy-2'-fluoro
  misc_feature (8)..(13): 2'-deoxy-2'-fluoro
  misc_feature (15)..(15): 2'-deoxy-2'-fluoro
  misc_feature (19)..(19): 2'-deoxy-2'-fluoro
  misc_feature (20)..(21): n stands for thymidine
  misc_feature (20)..(20): Phosphorothioate 3'-Internucleotide Linkage
  misc_feature (20)..(19): 2'-deoxy-2'-fluoro
acucaaauuuuccgugggunn

SEQ ID NO: 2344 - RNA, 21 nt, Artificial Sequence
  Description of Artificial Sequence:  siNA antisense region
  misc_feature (1)..(3): 2'-deoxy-2'-fluoro
  misc_feature (7)..(12): 2'-deoxy-2'-fluoro
  misc_feature (14)..(14): 2'-deoxy-2'-fluoro
  misc_feature (18)..(19): 2'-deoxy-2'-fluoro
  misc_feature (20)..(20): Phosphorothioate 3'-Internucleotide Linkage
  misc_feature (20)..(21): n stands for thymidine
cucaaauuuuccgugggucnn

SEQ ID NO: 2345 - RNA, 21 nt, Artificial Sequence
  Description of Artificial Sequence:  siNA antisense region
  misc_feature (1)..(2): 2'-deoxy-2'-fluoro
  misc_feature (6)..(11): 2'-deoxy-2'-fluoro
  misc_feature (13)..(13): 2'-deoxy-2'-fluoro
  misc_feature (17)..(18): 2'-deoxy-2'-fluoro
  misc_feature (20)..(21): n stands for thymidine
  misc_feature (20)..(20): n stands for thymidine
  misc_feature (20)..(20): 2'-deoxy-2'-fluoro
ucaaauuuuccgugggucgnn

SEQ ID NO: 2346 - RNA, 21 nt, Artificial Sequence
  Description of Artificial Sequence:  siNA antisense region
  misc_feature (1)..(1): 2'-deoxy-2'-fluoro
  misc_feature (5)..(10): 2'-deoxy-2'-fluoro
  misc_feature (12)..(12): 2'-deoxy-2'-fluoro
  misc_feature (16)..(17): 2'-deoxy-2'-fluoro
  misc_feature (19)..(19): 2'-deoxy-2'-fluoro
  misc_feature (20)..(20): Phosphorothioate 3'-Internucleotide Linkage
  misc_feature (20)..(21): n stands for thymidine
caaauuuuccgugggucgunn

SEQ ID NO: 2347 - RNA, 30 nt, Artificial Sequence
  Description of Artificial Sequence:  siNA antisense region
  misc_feature (1)..(1): 5'-3 attached terminal phosphate
  misc_feature (30)..(30): 3'-3 attached terminal deoxyabasic moeity
gugcugggugccuuuuaaaaggcacccagc

SEQ ID NO: 2348 - RNA, 28 nt, Artificial Sequence
  Description of Artificial Sequence:  siNA antisense region
  misc_feature (1)..(1): 5'-3 attached terminal phosphate
  misc_feature (28)..(28): 3'-3 attached terminal deoxyabasic moeity
gugcugggugccuuuaaaggcacccagc

SEQ ID NO: 2349 - RNA, 26 nt, Artificial Sequence
  Description of Artificial Sequence:  siNA antisense region
  misc_feature (1)..(1): 5'-3 attached terminal phosphate
  misc_feature (26)..(26): 3'-3 attached terminal deoxyabasic moeity
gugcugggugccuuaaggcacccagc

SEQ ID NO: 2350 - RNA, 27 nt, Artificial Sequence
  Description of Artificial Sequence:  siNA antisense region
  misc_feature (1)..(1): 5'-3 attached terminal phosphate
  misc_feature (27)..(27): 3'-3 attached terminal deoxyabasic moeity
aaugcuuuaucauauauaugauaaagc

SEQ ID NO: 2351 - RNA, 25 nt, Artificial Sequence
  Description of Artificial Sequence:  siNA antisense region
  misc_feature (1)..(1): 5'-3 attached terminal phosphate
  misc_feature (25)..(25): 3'-3 attached terminal deoxyabasic moeity
aaugcuuuaucauauaugauaaagc

SEQ ID NO: 2352 - RNA, 23 nt, Artificial Sequence
  Description of Artificial Sequence:  siNA antisense region
  misc_feature (1)..(1): 5'-3 attached terminal phosphate
  misc_feature (23)..(23): 3'-3 attached terminal deoxyabasic moeity
aaugcuuuaucauaugauaaagc

SEQ ID NO: 2353 - RNA, 24 nt, Artificial Sequence
  Description of Artificial Sequence:  siNA antisense region
  misc_feature (1)..(1): 5'-3 attached terminal phosphate
  misc_feature (24)..(24): 3'-3 attached terminal deoxyabasic moeity
aaugcuuuaucauaugauaaagca

SEQ ID NO: 2354 - RNA, 28 nt, Artificial Sequence
  Description of Artificial Sequence:  siNA antisense region
  misc_feature (1)..(1): 5'-3 attached terminal phosphate
  misc_feature (28)..(28): 3'-3 attached terminal deoxyabasic moeity
aaugcuuuaucauauaugauaaagcauu

SEQ ID NO: 2355 - RNA, 26 nt, Artificial Sequence
  Description of Artificial Sequence:  siNA antisense region
  misc_feature (1)..(1): 5'-3 attached terminal phosphate
  misc_feature (26)..(26): 3'-3 attached terminal deoxyabasic moeity
aaugcuuuaucauaugauaaagcauu

SEQ ID NO: 2356 - RNA, 31 nt, Artificial Sequence
  Description of Artificial Sequence:  siNA antisense region
  misc_feature (1)..(1): 5'-3 attached terminal phosphate
  misc_feature (31)..(31): 3'-3 attached terminal deoxyabasic moeity
gggugccuuuuaaacucaggaguuuaaaagg

SEQ ID NO: 2357 - RNA, 31 nt, Artificial Sequence
  Description of Artificial Sequence:  siNA antisense region
  misc_feature (1)..(1): 5'-3 attached terminal phosphate
  misc_feature (31)..(31): 3'-3 attached terminal deoxyabasic moeity
gggugccuuuuaaacucgaguuuaaaaggca

SEQ ID NO: 2358 - RNA, 27 nt, Artificial Sequence
  Description of Artificial Sequence:  siNA antisense region
  misc_feature (1)..(1): 5'-3 attached terminal phosphate
  misc_feature (27)..(27): 3'-3 attached terminal deoxyabasic moeity
gggugccuuuuaaacuaguuuaaaagg

SEQ ID NO: 2359 - RNA, 28 nt, Artificial Sequence
  Description of Artificial Sequence:  siNA antisense region
  misc_feature (1)..(1): 5'-3 attached terminal phosphate
  misc_feature (28)..(28): 3'-3 attached terminal deoxyabasic moeity
gggugccuuuuaaacuaguuuaaaaggc

SEQ ID NO: 2360 - RNA, 29 nt, Artificial Sequence
  Description of Artificial Sequence:  siNA antisense region
  misc_feature (1)..(1): 5'-3 attached terminal phosphate
  misc_feature (29)..(29): 3'-3 attached terminal deoxyabasic moeity
gggugccuuuuaaacuaguuuaaaaggca

SEQ ID NO: 2361 - RNA, 30 nt, Artificial Sequence
  Description of Artificial Sequence:  siNA antisense region
  misc_feature (1)..(1): 5'-3 attached terminal phosphate
  misc_feature (30)..(30): 3'-3 attached terminal deoxyabasic moeity
gggugccuuuuaaacuaguuuaaaaggcac

SEQ ID NO: 2362 - RNA, 26 nt, Artificial Sequence
  Description of Artificial Sequence:  siNA antisense region
  misc_feature (1)..(1): 5'-3 attached terminal phosphate
  misc_feature (26)..(26): 3'-3 attached terminal deoxyabasic moeity
gggugccuuuuaaacguuuaaaaggc

SEQ ID NO: 2363 - RNA, 27 nt, Artificial Sequence
  Description of Artificial Sequence:  siNA antisense region
  misc_feature (1)..(1): 5'-3 attached terminal phosphate
  misc_feature (27)..(27): 3'-3 attached terminal deoxyabasic moeity
gggugccuuuuaaacguuuaaaaggca

SEQ ID NO: 2364 - RNA, 28 nt, Artificial Sequence
  Description of Artificial Sequence:  siNA antisense region
  misc_feature (1)..(1): 5'-3 attached terminal phosphate
  misc_feature (28)..(28): 3'-3 attached terminal deoxyabasic moeity
gggugccuuuuaaacguuuaaaaggcac

SEQ ID NO: 2365 - RNA, 21 nt, Artificial Sequence
  Description of Artificial Sequence:  siNA sense region
  misc_feature (20)..(21): n stands for thymidine
ccuuaugaugccagcaaaunn

SEQ ID NO: 2366 - RNA, 21 nt, Artificial Sequence
  Description of Artificial Sequence:  siNA sense region
  misc_feature (20)..(21): n stands for thymidine
cuuaugaugccagcaaaugnn

SEQ ID NO: 2367 - RNA, 21 nt, Artificial Sequence
  Description of Artificial Sequence:  siNA sense region
  misc_feature (20)..(21): n stands for thymidine
uuaugaugccagcaaauggnn

SEQ ID NO: 2368 - RNA, 21 nt, Artificial Sequence
  Description of Artificial Sequence:  siNA sense region
  misc_feature (20)..(21): n stands for thymidine
uaugaugccagcaaaugggnn

SEQ ID NO: 2369 - RNA, 21 nt, Artificial Sequence
  Description of Artificial Sequence:  siNA sense region
  misc_feature (20)..(21): n stands for thymidine20
augaugccagcaaaugggann

SEQ ID NO: 2370 - RNA, 21 nt, Artificial Sequence
  Description of Artificial Sequence:  siNA sense region
  misc_feature (20)..(21): n stands for thymidine
cagaccaugcuggacugcunn

SEQ ID NO: 2371 - RNA, 21 nt, Artificial Sequence
  Description of Artificial Sequence:  siNA sense region
  misc_feature (20)..(21): n stands for thymidine
agaccaugcuggacugcugnn

SEQ ID NO: 2372 - RNA, 21 nt, Artificial Sequence
  Description of Artificial Sequence:  siNA sense region
  misc_feature (20)..(21): n stands for thymidine
gaccaugcuggacugcuggnn

SEQ ID NO: 2373 - RNA, 21 nt, Artificial Sequence
  Description of Artificial Sequence:  siNA sense region
  misc_feature (20)..(21): n stands for thymidine
accaugcuggacugcuggcnn

SEQ ID NO: 2374 - RNA, 21 nt, Artificial Sequence
  Description of Artificial Sequence:  siNA sense region
  misc_feature (20)..(21): n stands for thymidine
ccaugcuggacugcuggcann

SEQ ID NO: 2375 - RNA, 21 nt, Artificial Sequence
  Description of Artificial Sequence:  siNA sense region
  misc_feature (20)..(21): n stands for thymidine
caggauggcaaagacuacann

SEQ ID NO: 2376 - RNA, 21 nt, Artificial Sequence
  Description of Artificial Sequence:  siNA sense region
  misc_feature (20)..(21): n stands for thymidine
aggauggcaaagacuacaunn

SEQ ID NO: 2377 - RNA, 21 nt, Artificial Sequence
  Description of Artificial Sequence:  siNA antisense region
  misc_feature (20)..(21): n stands for thymidine
auuugcuggcaucauaaggnn

SEQ ID NO: 2378 - RNA, 21 nt, Artificial Sequence
  Description of Artificial Sequence:  siNA antisense region
  misc_feature (20)..(21): n stands for thymidine
cauuugcuggcaucauaagnn

SEQ ID NO: 2379 - RNA, 21 nt, Artificial Sequence
  Description of Artificial Sequence:  siNA antisense region
  misc_feature (20)..(21): n stands for thymidine
ccauuugcuggcaucauaann

SEQ ID NO: 2380 - RNA, 21 nt, Artificial Sequence
  Description of Artificial Sequence:  siNA antisense region
  misc_feature (20)..(21): n stands for thymidine
cccauuugcuggcaucauann

SEQ ID NO: 2381 - RNA, 21 nt, Artificial Sequence
  Description of Artificial Sequence:  siNA antisense region
  misc_feature (20)..(21): n stands for thymidine
ucccauuugcuggcaucaunn

SEQ ID NO: 2382 - RNA, 21 nt, Artificial Sequence
  Description of Artificial Sequence:  siNA antisense region
  misc_feature (20)..(21): n stands for thymidine
agcaguccagcauggucugnn

SEQ ID NO: 2383 - RNA, 21 nt, Artificial Sequence
  Description of Artificial Sequence:  siNA antisense region
  misc_feature (20)..(21): n stands for thymidine
cagcaguccagcauggucunn

SEQ ID NO: 2384 - RNA, 21 nt, Artificial Sequence
  Description of Artificial Sequence:  siNA antisense region
  misc_feature (20)..(21): n stands for thymidine
ccagcaguccagcauggucnn

SEQ ID NO: 2385 - RNA, 21 nt, Artificial Sequence
  Description of Artificial Sequence:  siNA antisense region
  misc_feature (20)..(21): n stands for thymidine
gccagcaguccagcauggunn

SEQ ID NO: 2386 - RNA, 21 nt, Artificial Sequence
  Description of Artificial Sequence:  siNA antisense region
  misc_feature (20)..(21): n stands for thymidine
ugccagcaguccagcauggnn

SEQ ID NO: 2387 - RNA, 21 nt, Artificial Sequence
  Description of Artificial Sequence:  siNA antisense region
  misc_feature (20)..(21): n stands for thymidine
uguagucuuugccauccugnn

SEQ ID NO: 2388 - RNA, 21 nt, Artificial Sequence
  Description of Artificial Sequence:  siNA antisense region
  misc_feature (20)..(21): n stands for thymidine
auguagucuuugccauccunn

SEQ ID NO: 2389 - RNA, 21 nt, Artificial Sequence
  Description of Artificial Sequence:  siNA sense region
  misc_feature (1)..(1): 5'-3 attached terminal deoxyabasic moeity
  misc_feature (20)..(21): n stands for thymidine
  misc_feature (21)..(21): 3'-3 attached terminal deoxyabasic moeity
accuuggagcaucucaucunn

SEQ ID NO: 2390 - RNA, 21 nt, Artificial Sequence
  Description of Artificial Sequence:  siNA sense region
  misc_feature (1)..(1): 5'-3 attached terminal deoxyabasic moeity
  misc_feature (20)..(21): n stands for thymidine
  misc_feature (21)..(21): 3'-3 attached terminal deoxyabasic moeity
accuguuuccuguauggagnn

SEQ ID NO: 2391 - RNA, 21 nt, Artificial Sequence
  Description of Artificial Sequence:  siNA antisense region
  misc_feature (20)..(21): n stands for thymidine
  misc_feature (20)..(20): Phosphorothioate 3'-Internucleotide Linkage
  misc_feature (20)..(20): Phosphorothioate 3'-Internucleotide Linkage
agaugagaugcuccaaggunn

SEQ ID NO: 2392 - RNA, 21 nt, Artificial Sequence
  Description of Artificial Sequence:  siNA antisense region
  misc_feature (20)..(20): Phosphorothioate 3'-Internucleotide Linkage
  misc_feature (20)..(21): n stands for thymidine
cuccauacaggaaacaggunn

SEQ ID NO: 2393 - RNA, 21 nt, Artificial Sequence
  Description of Artificial Sequence:  siNA sense region
  misc_feature (1)..(1): 5'-3 attached terminal deoxyabasic moeity
  misc_feature (20)..(21): n stands for thymidine
  misc_feature (21)..(21): 3'-3 attached terminal deoxyabasic moeity
ucuacucuacgagguuccann

SEQ ID NO: 2394 - RNA, 21 nt, Artificial Sequence
  Description of Artificial Sequence:  siNA sense region
  misc_feature (1)..(1): 5'-3 attached terminal deoxyabasic moeity
  misc_feature (20)..(21): n stands for thymidine
  misc_feature (21)..(21): 3'-3 attached terminal deoxyabasic moeity
gagguauguccuuuguccann

SEQ ID NO: 2395 - RNA, 21 nt, Artificial Sequence
  Description of Artificial Sequence:  siNA antisense region
  misc_feature (20)..(21): n stands for thymidine
  misc_feature (20)..(20): Phosphorothioate 3'-Internucleotide Linkage
uggaaccucguagaguagann

SEQ ID NO: 2396 - RNA, 21 nt, Artificial Sequence
  Description of Artificial Sequence:  siNA antisense region
  misc_feature (20)..(20): Phosphorothioate 3'-Internucleotide Linkage
  misc_feature (20)..(21): n stands for thymidine
uggacaaaggacauaccucnn

SEQ ID NO: 2397 - RNA, 21 nt, Artificial Sequence
  Description of Artificial Sequence:  siNA sense region
  misc_feature (1)..(1): 5'-3 attached terminal deoxyabasic moeity
  misc_feature (1)..(1): 2'-deoxy-2'-fluoro
  misc_feature (6)..(11): 2'-deoxy-2'-fluoro
  misc_feature (16)..(16): 2'-deoxy-2'-fluoro
  misc_feature (19)..(19): 2'-deoxy-2'-fluoro
  misc_feature (20)..(21): n stands for thymidine
  misc_feature (21)..(21): 3'-3 attached terminal deoxyabasic moeity
cagaauuuccugggacagcnn

SEQ ID NO: 2398 - RNA, 21 nt, Artificial Sequence
  Description of Artificial Sequence:  siNA sense region
  misc_feature (1)..(1): 5'-3 attached terminal deoxyabasic moeity
  misc_feature (4)..(4): 2'-deoxy-2'-fluoro
  misc_feature (6)..(9): 2'-deoxy-2'-fluoro
  misc_feature (11)..(13): 2'-deoxy-2'-fluoro
  misc_feature (15)..(16): 2'-deoxy-2'-fluoro
  misc_feature (18)..(18): 2'-deoxy-2'-fluoro
  misc_feature (20)..(21): n stands for thymidine
  misc_feature (21)..(21): 3'-3 attached terminal deoxyabasic moeity
gagcaucucaucuguuacann

SEQ ID NO: 2399 - RNA, 21 nt, Artificial Sequence
  Description of Artificial Sequence:  siNA sense region
  misc_feature (1)..(1): 5'-3 attached terminal deoxyabasic moeity
  misc_feature (1)..(1): 2'-deoxy-2'-fluoro
  misc_feature (3)..(7): 2'-deoxy-2'-fluoro
  misc_feature (12)..(13): 2'-deoxy-2'-fluoro
  misc_feature (16)..(16): 2'-deoxy-2'-fluoro
  misc_feature (20)..(21): n stands for thymidine
  misc_feature (21)..(21): 3'-3 attached terminal deoxyabasic moeity
cguuuucagaguugguggann

SEQ ID NO: 2400 - RNA, 21 nt, Artificial Sequence
  Description of Artificial Sequence:  siNA sense region
  misc_feature (1)..(1): 2'-deoxy-2'-fluoro
  misc_feature (1)..(1): 5'-3 attached terminal deoxyabasic moeity
  misc_feature (3)..(5): 2'-deoxy-2'-fluoro
  misc_feature (7)..(12): 2'-deoxy-2'-fluoro
  misc_feature (14)..(14): 2'-deoxy-2'-fluoro
  misc_feature (16)..(16): 2'-deoxy-2'-fluoro
  misc_feature (20)..(21): n stands for thymidine
  misc_feature (21)..(21): 3'-3 attached terminal deoxyabasic moeity
caccuguuuccuguauggann

SEQ ID NO: 2401 - RNA, 21 nt, Artificial Sequence
  Description of Artificial Sequence:  siNA antisense region
  misc_feature (2)..(3): 2'-deoxy-2'-fluoro
  misc_feature (5)..(8): 2'-deoxy-2'-fluoro
  misc_feature (15)..(18): 2'-deoxy-2'-fluoro
  misc_feature (20)..(21): n stands for thymidine
  misc_feature (20)..(20): Phosphorothioate 3'-Internucleotide Linkage
gcugucccaggaaauucugnn

SEQ ID NO: 2402 - RNA, 21 nt, Artificial Sequence
  Description of Artificial Sequence:  siNA antisense region
  misc_feature (1)..(1): 2'-deoxy-2'-fluoro
  misc_feature (3)..(3): 2'-deoxy-2'-fluoro
  misc_feature (6)..(6): 2'-deoxy-2'-fluoro
  misc_feature (10)..(10): 2'-deoxy-2'-fluoro
  misc_feature (15)..(15): 2'-deoxy-2'-fluoro
  misc_feature (17)..(19): 2'-deoxy-2'-fluoro
  misc_feature (20)..(20): Phosphorothioate 3'-Internucleotide Linkage
  misc_feature (20)..(21): n stands for thymidine
uguaacagaugagaugcucnn

SEQ ID NO: 2403 - RNA, 21 nt, Artificial Sequence
  Description of Artificial Sequence:  siNA antisense region
  misc_feature (1)..(3): 2'-deoxy-2'-fluoro
  misc_feature (5)..(6): 2'-deoxy-2'-fluoro
  misc_feature (9)..(12): 2'-deoxy-2'-fluoro
  misc_feature (18)..(18): 2'-deoxy-2'-fluoro
  misc_feature (20)..(21): n stands for thymidine
  misc_feature (20)..(20): Phosphorothioate 3'-Internucleotide Linkage
uccaccaacucugaaaacgnn

SEQ ID NO: 2404 - RNA, 21 nt, Artificial Sequence
  Description of Artificial Sequence:  siNA antisense region
  misc_feature (1)..(3): 2'-deoxy-2'-fluoro
  misc_feature (5)..(5): 2'-deoxy-2'-fluoro
  misc_feature (7)..(7): 2'-deoxy-2'-fluoro
  misc_feature (14)..(14): 2'-deoxy-2'-fluoro
  misc_feature (18)..(18): 2'-deoxy-2'-fluoro
  misc_feature (20)..(20): Phosphorothioate 3'-Internucleotide Linkage
  misc_feature (20)..(21): n stands for thymidine
uccauacaggaaacaggugnn

SEQ ID NO: 2405 - RNA, 21 nt, Artificial Sequence
  Description of Artificial Sequence:  siNA antisense region
  misc_feature (1)..(4): 2'-deoxy-2'-fluoro
  misc_feature (6)..(6): 2'-deoxy-2'-fluoro
  misc_feature (8)..(8): 2'-deoxy-2'-fluoro
  misc_feature (15)..(15): 2'-deoxy-2'-fluoro
  misc_feature (19)..(19): 2'-deoxy-2'-fluoro
  misc_feature (20)..(21): n stands for thymidine
  misc_feature (20)..(20): Phosphorothioate 3'-Internucleotide Linkage
cuccauacaggaaacaggunn

SEQ ID NO: 2406 - RNA, 21 nt, Artificial Sequence
  Description of Artificial Sequence:  siNA sense region
  misc_feature (1)..(1): 2'-deoxy-2'-fluoro
  misc_feature (1)..(1): 5'-3 attached terminal deoxyabasic moeity
  misc_feature (4)..(4): 2'-deoxy-2'-fluoro
  misc_feature (9)..(14): 2'-deoxy-2'-fluoro
  misc_feature (19)..(19): 2'-deoxy-2'-fluoro
  misc_feature (20)..(21): n stands for thymidine
  misc_feature (21)..(21): 3'-3 attached terminal deoxyabasic moeity
cgacaggguccuuuaagacnn

SEQ ID NO: 2407 - RNA, 21 nt, Artificial Sequence
  Description of Artificial Sequence:  siNA sense region
  misc_feature (1)..(1): 5'-3 attached terminal deoxyabasic moeity
  misc_feature (2)..(2): 2'-deoxy-2'-fluoro
  misc_feature (4)..(5): 2'-deoxy-2'-fluoro
  misc_feature (7)..(9): 2'-deoxy-2'-fluoro
  misc_feature (11)..(14): 2'-deoxy-2'-fluoro
  misc_feature (16)..(16): 2'-deoxy-2'-fluoro
  misc_feature (20)..(21): n stands for thymidine
  misc_feature (21)..(21): 3'-3 attached terminal deoxyabasic moeity
acauugucuacucuacgagnn

SEQ ID NO: 2408 - RNA, 21 nt, Artificial Sequence
  Description of Artificial Sequence:  siNA sense region
  misc_feature (1)..(1): 5'-3 attached terminal deoxyabasic moeity
  misc_feature (4)..(4): 2'-deoxy-2'-fluoro
  misc_feature (7)..(8): 2'-deoxy-2'-fluoro
  misc_feature (13)..(17): 2'-deoxy-2'-fluoro
  misc_feature (19)..(19): 2'-deoxy-2'-fluoro
  misc_feature (20)..(21): n stands for thymidine
  misc_feature (21)..(21): 3'-3 attached terminal deoxyabasic moeity
aggugguugagacuuuugcnn

SEQ ID NO: 2409 - RNA, 21 nt, Artificial Sequence
  Description of Artificial Sequence:  siNA sense region
  misc_feature (1)..(1): 5'-3 attached terminal deoxyabasic moeity
  misc_feature (4)..(4): 2'-deoxy-2'-fluoro
  misc_feature (6)..(6): 2'-deoxy-2'-fluoro
  misc_feature (8)..(13): 2'-deoxy-2'-fluoro
  misc_feature (15)..(17): 2'-deoxy-2'-fluoro
  misc_feature (19)..(19): 2'-deoxy-2'-fluoro
  misc_feature (20)..(21): n stands for thymidine
  misc_feature (21)..(21): 3'-3 attached terminal deoxyabasic moeity
agguauguccuuuguccacnn

SEQ ID NO: 2410 - RNA, 21 nt, Artificial Sequence
  Description of Artificial Sequence:  siNA sense region
  misc_feature (1)..(1): 5'-3 attached terminal deoxyabasic moeity
  misc_feature (5)..(5): 2'-deoxy-2'-fluoro
  misc_feature (7)..(7): 2'-deoxy-2'-fluoro
  misc_feature (9)..(14): 2'-deoxy-2'-fluoro
  misc_feature (16)..(18): 2'-deoxy-2'-fluoro
  misc_feature (20)..(21): n stands for thymidine
  misc_feature (21)..(21): 3'-3 attached terminal deoxyabasic moeity
gagguauguccuuuguccann

SEQ ID NO: 2411 - RNA, 21 nt, Artificial Sequence
  Description of Artificial Sequence:  siNA antisense region
  misc_feature (2)..(5): 2'-deoxy-2'-fluoro
  misc_feature (12)..(15): 2'-deoxy-2'-fluoro
  misc_feature (17)..(18): 2'-deoxy-2'-fluoro
  misc_feature (20)..(21): n stands for thymidine
  misc_feature (20)..(20): Phosphorothioate 3'-Internucleotide Linkage
  misc_feature (20)..(20): Phosphorothioate 3'-Internucleotide Linkage
  misc_feature (20)..(21): n stands for thymidine
gucuuaaaggacccugucgnn

SEQ ID NO: 2412 - RNA, 21 nt, Artificial Sequence
  Description of Artificial Sequence:  siNA antisense region
  misc_feature (1)..(3): 2'-deoxy-2'-fluoro
  misc_feature (5)..(5): 2'-deoxy-2'-fluoro
  misc_feature (10)..(10): 2'-deoxy-2'-fluoro
  misc_feature (14)..(14): 2'-deoxy-2'-fluoro
  misc_feature (17)..(17): 2'-deoxy-2'-fluoro
  misc_feature (19)..(19): 2'-deoxy-2'-fluoro
  misc_feature (20)..(21): n stands for thymidine
  misc_feature (20)..(20): Phosphorothioate 3'-Internucleotide Linkage
cucguagaguagacaaugunn

SEQ ID NO: 2413 - RNA, 21 nt, Artificial Sequence
  Description of Artificial Sequence:  siNA antisense region
  misc_feature (2)..(2): 2'-deoxy-2'-fluoro
  misc_feature (8)..(11): 2'-deoxy-2'-fluoro
  misc_feature (14)..(15): 2'-deoxy-2'-fluoro
  misc_feature (17)..(19): 2'-deoxy-2'-fluoro
  misc_feature (20)..(20): Phosphorothioate 3'-Internucleotide Linkage
  misc_feature (20)..(21): n stands for thymidine
gcaaaagucucaaccaccunn

SEQ ID NO: 2414 - RNA, 21 nt, Artificial Sequence
  Description of Artificial Sequence:  siNA antisense region
  misc_feature (2)..(2): 2'-deoxy-2'-fluoro
  misc_feature (6)..(6): 2'-deoxy-2'-fluoro
  misc_feature (13)..(13): 2'-deoxy-2'-fluoro
  misc_feature (15)..(15): 2'-deoxy-2'-fluoro
  misc_feature (17)..(19): 2'-deoxy-2'-fluoro
  misc_feature (20)..(21): n stands for thymidine
  misc_feature (20)..(20): Phosphorothioate 3'-Internucleotide Linkage
guggacaaaggacauaccunn

SEQ ID NO: 2415 - RNA, 21 nt, Artificial Sequence
  Description of Artificial Sequence:  siNA antisense region
  misc_feature (1)..(1): 2'-deoxy-2'-fluoro
  misc_feature (5)..(5): 2'-deoxy-2'-fluoro
  misc_feature (12)..(12): 2'-deoxy-2'-fluoro
  misc_feature (14)..(14): 2'-deoxy-2'-fluoro
  misc_feature (16)..(19): 2'-deoxy-2'-fluoro
  misc_feature (20)..(20): Phosphorothioate 3'-Internucleotide Linkage
  misc_feature (20)..(21): n stands for thymidine
uggacaaaggacauaccucnn

SEQ ID NO: 2416 - RNA, 21 nt, Artificial Sequence
  Description of Artificial Sequence:  siNA sense region
  misc_feature (1)..(1): 5'-3 attached terminal deoxyabasic moeity
  misc_feature (20)..(21): n stands for thymidine
  misc_feature (21)..(21): 3'-3 attached terminal deoxyabasic moeity
cagaauuuccugggacagcnn

SEQ ID NO: 2417 - RNA, 21 nt, Artificial Sequence
  Description of Artificial Sequence:  siNA sense region
  misc_feature (1)..(1): 5'-3 attached terminal deoxyabasic moeity
  misc_feature (20)..(21): n stands for thymidine
  misc_feature (21)..(21): 3'-3 attached terminal deoxyabasic moeity
gagcaucucaucuguuacann

SEQ ID NO: 2418 - RNA, 21 nt, Artificial Sequence
  Description of Artificial Sequence:  siNA sense region
  misc_feature (1)..(1): 5'-3 attached terminal deoxyabasic moeity
  misc_feature (20)..(21): n stands for thymidine
  misc_feature (21)..(21): 3'-3 attached terminal deoxyabasic moeity
cguuuucagaguugguggann

SEQ ID NO: 2419 - RNA, 21 nt, Artificial Sequence
  Description of Artificial Sequence:  siNA sense region
  misc_feature (1)..(1): 5'-3 attached terminal deoxyabasic moeity
  misc_feature (20)..(21): n stands for thymidine
  misc_feature (21)..(21): 3'-3 attached terminal deoxyabasic moeity
caccuguuuccuguauggann

SEQ ID NO: 2420 - RNA, 21 nt, Artificial Sequence
  Description of Artificial Sequence:  siNA antisense region
  misc_feature (20)..(20): Phosphorothioate 3'-Internucleotide Linkage
  misc_feature (20)..(21): n stands for thymidine
gcugucccaggaaauucugnn

SEQ ID NO: 2421 - RNA, 21 nt, Artificial Sequence
  Description of Artificial Sequence:  siNA antisense region
  misc_feature (20)..(21): n stands for thymidine
  misc_feature (20)..(20): Phosphorothioate 3'-Internucleotide Linkage
uguaacagaugagaugcucnn

SEQ ID NO: 2422 - RNA, 21 nt, Artificial Sequence
  Description of Artificial Sequence:  siNA antisense region
  misc_feature (20)..(20): Phosphorothioate 3'-Internucleotide Linkage
  misc_feature (20)..(21): n stands for thymidine
uccaccaacucugaaaacgnn

SEQ ID NO: 2423 - RNA, 21 nt, Artificial Sequence
  Description of Artificial Sequence:  siNA antisense region
  misc_feature (20)..(21): n stands for thymidine
  misc_feature (20)..(20): Phosphorothioate 3'-Internucleotide Linkage
uccauacaggaaacaggugnn

SEQ ID NO: 2424 - RNA, 21 nt, Artificial Sequence
  Description of Artificial Sequence:  siNA sense region
  misc_feature (1)..(1): 5'-3 attached terminal deoxyabasic moeity
  misc_feature (20)..(21): n stands for thymidine
  misc_feature (21)..(21): 3'-3 attached terminal deoxyabasic moeity
cgacaggguccuuuaagacnn

SEQ ID NO: 2425 - RNA, 21 nt, Artificial Sequence
  Description of Artificial Sequence:  siNA sense region
  misc_feature (1)..(1): 5'-3 attached terminal deoxyabasic moeity
  misc_feature (20)..(21): n stands for thymidine
  misc_feature (21)..(21): 3'-3 attached terminal deoxyabasic moeity
acauugucuacucuacgagnn

SEQ ID NO: 2426 - RNA, 21 nt, Artificial Sequence
  Description of Artificial Sequence:  siNA sense region
  misc_feature (1)..(1): 5'-3 attached terminal deoxyabasic moeity
  misc_feature (20)..(21): n stands for thymidine
  misc_feature (21)..(21): 3'-3 attached terminal deoxyabasic moeity
aggugguugagacuuuugcnn

SEQ ID NO: 2427 - RNA, 21 nt, Artificial Sequence
  Description of Artificial Sequence:  siNA sense region
  misc_feature (1)..(1): 5'-3 attached terminal deoxyabasic moeity
  misc_feature (20)..(21): n stands for thymidine
  misc_feature (21)..(21): 3'-3 attached terminal deoxyabasic moeity
agguauguccuuuguccacnn

SEQ ID NO: 2428 - RNA, 21 nt, Artificial Sequence
  Description of Artificial Sequence:  siNA antisense region
  misc_feature (20)..(20): Phosphorothioate 3'-Internucleotide Linkage
  misc_feature (20)..(21): n stands for thymidine
gucuuaaaggacccugucgnn

SEQ ID NO: 2429 - RNA, 21 nt, Artificial Sequence
  Description of Artificial Sequence:  siNA antisense region
  misc_feature (20)..(21): n stands for thymidine
  misc_feature (20)..(20): Phosphorothioate 3'-Internucleotide Linkage
cucguagaguagacaaugunn

SEQ ID NO: 2430 - RNA, 21 nt, Artificial Sequence
  Description of Artificial Sequence:  siNA antisense region
  misc_feature (20)..(20): Phosphorothioate 3'-Internucleotide Linkage
  misc_feature (20)..(21): n stands for thymidine
gcaaaagucucaaccaccunn

SEQ ID NO: 2431 - RNA, 21 nt, Artificial Sequence
  Description of Artificial Sequence:  siNA antisense region
  misc_feature (20)..(21): n stands for thymidine
  misc_feature (20)..(20): Phosphorothioate 3'-Internucleotide Linkage
guggacaaaggacauaccunn

SEQ ID NO: 2432 - RNA, 21 nt, Artificial Sequence
  Description of Artificial Sequence:  siNA sense region
  misc_feature (20)..(21): n stands for thymidine
uucuaugugaccaccauccnn

SEQ ID NO: 2433 - RNA, 21 nt, Artificial Sequence
  Description of Artificial Sequence:  siNA sense region
  misc_feature (20)..(21): n stands for thymidine
agcacugccacaagaaguann

SEQ ID NO: 2434 - RNA, 21 nt, Artificial Sequence
  Description of Artificial Sequence:  siNA sense region
  misc_feature (20)..(21): n stands for thymidine
uacggcaaccucuccaacunn

SEQ ID NO: 2435 - RNA, 21 nt, Artificial Sequence
  Description of Artificial Sequence:  siNA antisense region
  misc_feature (20)..(21): n stands for thymidine
ggaugguggucacauagaann

SEQ ID NO: 2436 - RNA, 21 nt, Artificial Sequence
  Description of Artificial Sequence:  siNA antisense region
  misc_feature (20)..(21): n stands for thymidine
uacuucuuguggcagugcunn

SEQ ID NO: 2437 - RNA, 21 nt, Artificial Sequence
  Description of Artificial Sequence:  siNA antisense region
  misc_feature (20)..(21): n stands for thymidine
aguuggagagguugccguann

SEQ ID NO: 2438 - RNA, 23 nt, Artificial Sequence
  Description of Artificial Sequence:  Target Sequence
aguuuaaaaggcacccagcacau

SEQ ID NO: 2439 - RNA, 23 nt, Artificial Sequence
  Description of Artificial Sequence:  Target Sequence
gcauauauaugauaaagcauuca

SEQ ID NO: 2440 - RNA, 23 nt, Artificial Sequence
  Description of Artificial Sequence:  Target Sequence
cugccauguacaagugugugguc

SEQ ID NO: 2441 - RNA, 23 nt, Artificial Sequence
  Description of Artificial Sequence:  Target Sequence
acugccacaagaaguaccugucg

SEQ ID NO: 2442 - RNA, 23 nt, Artificial Sequence
  Description of Artificial Sequence:  Target Sequence
uggugaagaucugugacuuuggc

SEQ ID NO: 2443 - RNA, 23 nt, Artificial Sequence
  Description of Artificial Sequence:  Target Sequence
gaagaucugugacuuuggccuug

SEQ ID NO: 2444 - RNA, 21 nt, Artificial Sequence
  Description of Artificial Sequence:  siNA sense region
  misc_feature (20)..(21): n stands for thymidine
  misc_feature (21)..(21): 3'-3 attached terminal deoxyabasic moeity
cugaguuuaaaaggcacccnn

SEQ ID NO: 2445 - RNA, 22 nt, Artificial Sequence
  Description of Artificial Sequence:  siNA antisense region
  misc_feature (1)..(1): n stands for L-thymidine
  misc_feature (2)..(4): 2'-O-methyl
  misc_feature (5)..(5): 2'-deoxy-2'-fluoro
  misc_feature (6)..(6): 2'-O-methyl
  misc_feature (7)..(12): 2'-deoxy-2'-fluoro
  misc_feature (13)..(15): 2'-O-methyl
  misc_feature (16)..(18): 2'-deoxy-2'-fluoro
  misc_feature (19)..(20): 2'-O-methyl
  misc_feature (21)..(22): n stands for thymidine
  misc_feature (21)..(21): Phosphorothioate 3'-Internucleotide Linkage
ngggugccuuuuaaacucagnn

SEQ ID NO: 2446 - skipped

SEQ ID NO: 2447 - RNA, 21 nt, Artificial Sequence
  Description of Artificial Sequence:  siNA antisense region
  misc_feature (1)..(1): 5'-Amino Mod C3-TFA
  misc_feature (1)..(3): 2'-O-methyl
  misc_feature (4)..(4): 2'-deoxy-2'-fluoro
  misc_feature (5)..(5): 2'-O-methyl
  misc_feature (6)..(11): 2'-deoxy-2'-fluoro
  misc_feature (12)..(14): 2'-O-methyl
  misc_feature (15)..(17): 2'-deoxy-2'-fluoro
  misc_feature (18)..(19): 2'-O-methyl
  misc_feature (20)..(20): Phosphorothioate 3'-Internucleotide Linkage
  misc_feature (20)..(21): n stands for thymidine
gggugccuuuuaaacucagnn

SEQ ID NO: 2448 - RNA, 21 nt, Artificial Sequence
  Description of Artificial Sequence:  siNA antisense region
  misc_feature (1)..(1): n stands for inosine
  misc_feature (20)..(21): n stands for thymidine
nggugccuuuuaaacucagnn

SEQ ID NO: 2449 - RNA, 21 nt, Artificial Sequence
  Description of Artificial Sequence:  siNA sense region
  misc_feature (1)..(1): 5'-3 attached terminal deoxyabasic moeity
  misc_feature (1)..(1): 2'-deoxy-2'-fluoro
  misc_feature (2)..(2): 2'-deoxy
  misc_feature (3)..(3): 2'-deoxy-2'-fluoro
  misc_feature (4)..(4): 2'-deoxy
  misc_feature (5)..(6): 2'-deoxy-2'-fluoro
  misc_feature (7)..(9): 2'-deoxy
  misc_feature (10)..(11): 2'-deoxy-2'-fluoro
  misc_feature (12)..(12): 2'-deoxy
  misc_feature (13)..(14): 2'-deoxy-2'-fluoro
  misc_feature (15)..(16): 2'-deoxy
  misc_feature (17)..(17): 2'-deoxy-2'-fluoro
  misc_feature (18)..(18): 2'-deoxy
  misc_feature (19)..(19): 2'-deoxy-2'-fluoro
  misc_feature (20)..(21): n stands for thymidine
  misc_feature (21)..(21): 3'-3 attached terminal deoxyabasic moeity
caugcuggacugcuggcacnn

SEQ ID NO: 2450 - RNA, 21 nt, Artificial Sequence
  Description of Artificial Sequence:  siNA sense region
  misc_feature (1)..(1): 5'-3 attached terminal deoxyabasic moeity
  misc_feature (1)..(1): 2'-deoxy
  misc_feature (2)..(2): 2'-deoxy-2'-fluoro
  misc_feature (3)..(3): 2'-deoxy
  misc_feature (4)..(5): 2'-deoxy-2'-fluoro
  misc_feature (6)..(8): 2'-deoxy
  misc_feature (9)..(10): 2'-deoxy-2'-fluoro
  misc_feature (11)..(11): 2'-deoxy
  misc_feature (12)..(13): 2'-deoxy-2'-fluoro
  misc_feature (14)..(15): 2'-deoxy
  misc_feature (16)..(16): 2'-deoxy-2'-fluoro
  misc_feature (17)..(17): 2'-deoxy
  misc_feature (18)..(18): 2'-deoxy-2'-fluoro
  misc_feature (19)..(19): 2'-deoxy
  misc_feature (20)..(21): n stands for thymidine
  misc_feature (21)..(21): 3'-3 attached terminal deoxyabasic moeity
augcuggacugcuggcacann

SEQ ID NO: 2451 - RNA, 21 nt, Artificial Sequence
  Description of Artificial Sequence:  siNA sense region
  misc_feature (20)..(21): n is a, c, g, or u
gugccagcaguccagcaugnn

SEQ ID NO: 2452 - RNA, 21 nt, Artificial Sequence
  Description of Artificial Sequence:  siNA antisense region
  misc_feature (1)..(1): 2'-deoxy-2'-fluoro
  misc_feature (2)..(2): 2'-O-methyl
  misc_feature (3)..(3): 2'-deoxy-2'-fluoro
  misc_feature (4)..(4): 2'-O-methyl
  misc_feature (5)..(6): 2'-deoxy-2'-fluoro
  misc_feature (7)..(8): 2'-O-methyl
  misc_feature (9)..(9): 2'-deoxy-2'-fluoro
  misc_feature (10)..(11): 2'-O-methyl
  misc_feature (12)..(14): 2'-deoxy-2'-fluoro
  misc_feature (15)..(16): 2'-O-methyl
  misc_feature (17)..(17): 2'-deoxy-2'-fluoro
  misc_feature (18)..(18): 2'-O-methyl
  misc_feature (19)..(19): 2'-deoxy-2'-fluoro
  misc_feature (20)..(21): n stands for thymidine
  misc_feature (20)..(20): Phosphorothioate 3'-Internucleotide Linkage
ugugccagcaguccagcaunn

SEQ ID NO: 2453 - RNA, 21 nt, Artificial Sequence
  Description of Artificial Sequence:  siNA sense region
  misc_feature (1)..(1): 5'-3 attached terminal deoxyabasic moeity
  misc_feature (20)..(21): n stands for thymidine
  misc_feature (21)..(21): 3'-3 attached terminal deoxyabasic moeity
caugcuggacugcuggcacnn

SEQ ID NO: 2454 - RNA, 21 nt, Artificial Sequence
  Description of Artificial Sequence:  siNA sense region
  misc_feature (1)..(1): 5'-3 attached terminal deoxyabasic moeity
  misc_feature (20)..(21): n stands for thymidine
  misc_feature (21)..(21): 3'-3 attached terminal deoxyabasic moeity
augcuggacugcuggcacann

SEQ ID NO: 2455 - RNA, 21 nt, Artificial Sequence
  Description of Artificial Sequence:  siNA antisense region
  misc_feature (20)..(21): n stands for thymidine
  misc_feature (20)..(20): Phosphorothioate 3'-Internucleotide Linkage
gugccagcaguccagcaugnn

SEQ ID NO: 2456 - RNA, 21 nt, Artificial Sequence
  Description of Artificial Sequence:  siNA antisense region
  misc_feature (20)..(20): Phosphorothioate 3'-Internucleotide Linkage
  misc_feature (20)..(21): n stands for thymidine
ugugccagcaguccagcaunn

SEQ ID NO: 2457 - RNA, 21 nt, Artificial Sequence
  Description of Artificial Sequence:  siNA sense region
  misc_feature (1)..(1): 5'-3 attached terminal deoxyabasic moeity
  misc_feature (1)..(1): 2'-deoxy-2'-fluoro
  misc_feature (2)..(2): 2'-deoxy
  misc_feature (3)..(3): 2'-deoxy-2'-fluoro
  misc_feature (4)..(5): 2'-deoxy
  misc_feature (6)..(7): 2'-deoxy-2'-fluoro
  misc_feature (8)..(8): 2'-deoxy
  misc_feature (9)..(10): 2'-deoxy-2'-fluoro
  misc_feature (11)..(13): 2'-deoxy
  misc_feature (14)..(15): 2'-deoxy-2'-fluoro
  misc_feature (16)..(16): 2'-deoxy
  misc_feature (17)..(17): 2'-deoxy-2'-fluoro
  misc_feature (18)..(18): 2'-deoxy
  misc_feature (19)..(19): 2'-deoxy-2'-fluoro
  misc_feature (20)..(21): n stands for thymidine
  misc_feature (21)..(21): 3'-3 attached terminal deoxyabasic moeity
cacggucgucaggucguacnn

SEQ ID NO: 2458 - RNA, 21 nt, Artificial Sequence
  Description of Artificial Sequence:  siNA sense region
  misc_feature (1)..(1): 5'-3 attached terminal deoxyabasic moeity
  misc_feature (1)..(1): 2'-deoxy
  misc_feature (2)..(2): 2'-deoxy-2'-fluoro
  misc_feature (3)..(3): 2'-deoxy
  misc_feature (4)..(4): 2'-deoxy-2'-fluoro
  misc_feature (5)..(6): 2'-deoxy
  misc_feature (7)..(8): 2'-deoxy-2'-fluoro
  misc_feature (9)..(9): 2'-deoxy
  misc_feature (10)..(11): 2'-deoxy-2'-fluoro
  misc_feature (12)..(14): 2'-deoxy
  misc_feature (15)..(16): 2'-deoxy-2'-fluoro
  misc_feature (17)..(17): 2'-deoxy
  misc_feature (18)..(18): 2'-deoxy-2'-fluoro
  misc_feature (19)..(19): 2'-deoxy
  misc_feature (20)..(21): n stands for thymidine
  misc_feature (21)..(21): 3'-3 attached terminal deoxyabasic moeity
acacggucgucaggucguann

SEQ ID NO: 2459 - RNA, 21 nt, Artificial Sequence
  Description of Artificial Sequence:  siNA antisense region
  misc_feature (1)..(1): 2'-O-methyl
  misc_feature (2)..(2): 2'-deoxy-2'-fluoro
  misc_feature (3)..(3): 2'-O-methyl
  misc_feature (4)..(4): 2'-deoxy-2'-fluoro
  misc_feature (5)..(6): 2'-O-methyl
  misc_feature (7)..(9): 2'-deoxy-2'-fluoro
  misc_feature (10)..(11): 2'-O-methyl
  misc_feature (12)..(12): 2'-deoxy-2'-fluoro
  misc_feature (13)..(14): 2'-O-methyl
  misc_feature (15)..(16): 2'-deoxy-2'-fluoro
  misc_feature (17)..(17): 2'-O-methyl
  misc_feature (18)..(18): 2'-deoxy-2'-fluoro
  misc_feature (19)..(19): 2'-O-methyl
  misc_feature (20)..(20): Phosphorothioate 3'-Internucleotide Linkage
  misc_feature (20)..(21): n stands for thymidine
guacgaccugacgaccgugnn

SEQ ID NO: 2460 - RNA, 21 nt, Artificial Sequence
  Description of Artificial Sequence:  siNA antisense region
  misc_feature (1)..(1): 2'-deoxy-2'-fluoro
  misc_feature (2)..(2): 2'-O-methyl
  misc_feature (3)..(3): 2'-deoxy-2'-fluoro
  misc_feature (4)..(5): 2'-O-methyl
  misc_feature (6)..(8): 2'-deoxy-2'-fluoro
  misc_feature (9)..(10): 2'-O-methyl
  misc_feature (11)..(11): 2'-deoxy-2'-fluoro
  misc_feature (12)..(13): 2'-O-methyl
  misc_feature (14)..(15): 2'-deoxy-2'-fluoro
  misc_feature (16)..(16): 2'-O-methyl
  misc_feature (17)..(17): 2'-deoxy-2'-fluoro
  misc_feature (18)..(18): 2'-O-methyl
  misc_feature (19)..(19): 2'-deoxy-2'-fluoro
  misc_feature (20)..(20): Phosphorothioate 3'-Internucleotide Linkage
  misc_feature (20)..(21): n stands for L-thymidine
uacgaccugacgaccgugunn

SEQ ID NO: 2461 - RNA, 21 nt, Artificial Sequence
  Description of Artificial Sequence:  siNA sense region
  misc_feature (1)..(1): 5'-3 attached terminal glyceryl moeity
  misc_feature (20)..(21): n stands for L-thymidine
  misc_feature (21)..(21): 3'-3 attached terminal glyceryl moeity
cacggucgucaggucguacnn

SEQ ID NO: 2462 - RNA, 21 nt, Artificial Sequence
  Description of Artificial Sequence:  siNA sense region
  misc_feature (1)..(1): 5'-3 attached terminal glyceryl moeity
  misc_feature (20)..(21): n stands for thymidine
  misc_feature (21)..(21): 3'-3 attached terminal glyceryl moeity
acacggucgucaggucguann

SEQ ID NO: 2463 - RNA, 21 nt, Artificial Sequence
  Description of Artificial Sequence:  siNA antisense region
  misc_feature (20)..(20): Phosphorothioate 3'-Internucleotide Linkage
  misc_feature (20)..(21): n stands for thymidine
guacgaccugacgaccgugnn

SEQ ID NO: 2464 - RNA, 21 nt, Artificial Sequence
  Description of Artificial Sequence:  siNA antisense region
  misc_feature (20)..(20): Phosphorothioate 3'-Internucleotide Linkage
  misc_feature (20)..(21): n stands for thymidine
uacgaccugacgaccgugunn

SEQ ID NO: 2465 - RNA, 30 nt, Artificial Sequence
  Description of Artificial Sequence:  siNA antisense region
  misc_feature (1)..(1): n stands for L-thymidine
  misc_feature (30)..(30): 3'-3 attached terminal deoxyabasic moeity
nugcugggugccuuuuaaaaggcacccagc

SEQ ID NO: 2466 - RNA, 29 nt, Artificial Sequence
  Description of Artificial Sequence:  siNA antisense region
  misc_feature (1)..(1): n stands for L-thymidine
  misc_feature (29)..(29): 3'-3 attached terminal deoxyabasic moeity
ngcugggugccuuuuaaaaggcacccagc

SEQ ID NO: 2467 - RNA, 30 nt, Artificial Sequence
  Description of Artificial Sequence:  siNA antisense region
  misc_feature (1)..(1): n stands for L-thymidine
  misc_feature (30)..(30): 3'-3 attached terminal deoxyabasic moeity
ngcugggugccuuuuaaaaggcacccagcn

SEQ ID NO: 2468 - RNA, 28 nt, Artificial Sequence
  Description of Artificial Sequence:  siNA antisense region
  misc_feature (1)..(1): n stands for L-thymidine
  misc_feature (28)..(28): 3'-3 attached terminal deoxyabasic moeity
ngcugggugccuuuuaaaaggcacccag

SEQ ID NO: 2469 - RNA, 27 nt, Artificial Sequence
  Description of Artificial Sequence:  siNA antisense region
  misc_feature (1)..(1): n stands for L-thymidine
  misc_feature (27)..(27): 3'-3 attached terminal deoxyabasic moeity
ncugggugccuuuuaaaaggcacccag

SEQ ID NO: 2470 - RNA, 26 nt, Artificial Sequence
  Description of Artificial Sequence:  siNA antisense region
  misc_feature (1)..(1): n stands for L-thymidine
  misc_feature (26)..(26): 3'-3 attached terminal deoxyabasic moeity
ncugggugccuuuuaaaaggcaccca

SEQ ID NO: 2471 - RNA, 25 nt, Artificial Sequence
  Description of Artificial Sequence:  siNA antisense region
  misc_feature (1)..(1): n stands for L-thymidine
  misc_feature (25)..(25): 3'-3 attached terminal deoxyabasic moeity
nugggugccuuuuaaaaggcaccca

SEQ ID NO: 2472 - RNA, 26 nt, Artificial Sequence
  Description of Artificial Sequence:  siNA antisense region
  misc_feature (1)..(1): n stands for L-thymidine
  misc_feature (26)..(26): 3'-3 attached terminal deoxyabasic moeity
nugggugccuuuuaaaaggcacccan

SEQ ID NO: 2473 - RNA, 27 nt, Artificial Sequence
  Description of Artificial Sequence:  siNA antisense region
  misc_feature (1)..(1): n stands for L-thymidine
  misc_feature (26)..(27): n stands for thymidine
  misc_feature (27)..(27): 3'-3 attached terminal deoxyabasic moeity
nugggugccuuuuaaaaggcacccann

SEQ ID NO: 2474 - RNA, 27 nt, Artificial Sequence
  Description of Artificial Sequence:  siNA antisense region
  misc_feature (1)..(1): n stands for L-thymidine
  misc_feature (27)..(27): 3'-3 attached terminal deoxyabasic moeity
nugcuuuaucauauauaugauaaagca

SEQ ID NO: 2475 - RNA, 26 nt, Artificial Sequence
  Description of Artificial Sequence:  siNA antisense region
  misc_feature (1)..(1): n stands for L-thymidine
  misc_feature (26)..(26): 3'-3 attached terminal deoxyabasic moeity
nugcuuuaucauauauaugauaaagc

SEQ ID NO: 2476 - RNA, 25 nt, Artificial Sequence
  Description of Artificial Sequence:  siNA antisense region
  misc_feature (1)..(1): n stands for L-thymidine
  misc_feature (25)..(25): 3'-3 attached terminal deoxyabasic moeity
ngcuuuaucauauauaugauaaagc

SEQ ID NO: 2477 - RNA, 28 nt, Artificial Sequence
  Description of Artificial Sequence:  siNA antisense region
  misc_feature (28)..(28): 3'-3 attached terminal deoxyabasic moeity
aaugcuuuaucauauaugauaaagcauu

SEQ ID NO: 2478 - RNA, 30 nt, Artificial Sequence
  Description of Artificial Sequence:  siNA antisense region
  misc_feature (1)..(1): n stands for L-thymidine
  misc_feature (30)..(30): 3'-3 attached terminal deoxyabasic moeity
  misc_feature (30)..(30): n stands for thymidine
naaugcuuuaucauauaugauaaagcauun

SEQ ID NO: 2479 - RNA, 31 nt, Artificial Sequence
  Description of Artificial Sequence:  siNA antisense region
  misc_feature (1)..(1): n stands for L-thymidine
  misc_feature (30)..(31): n stands for thymidine
  misc_feature (31)..(31): 3'-3 attached terminal deoxyabasic moeity
naaugcuuuaucauauaugauaaagcauunn

SEQ ID NO: 2480 - RNA, 28 nt, Artificial Sequence
  Description of Artificial Sequence:  siNA antisense region
  misc_feature (1)..(1): n stands for L-thymidine
  misc_feature (28)..(28): 3'-3 attached terminal deoxyabasic moeity
naaugcuuuaucauauaugauaaagcau

SEQ ID NO: 2481 - RNA, 27 nt, Artificial Sequence
  Description of Artificial Sequence:  siNA antisense region
  misc_feature (1)..(1): n stands for L-thymidine
  misc_feature (27)..(27): 3'-3 attached terminal deoxyabasic moeity
naugcuuuaucauauaugauaaagcau

SEQ ID NO: 2482 - RNA, 28 nt, Artificial Sequence
  Description of Artificial Sequence:  siNA antisense region
  misc_feature (1)..(1): n stands for L-thymidine
  misc_feature (28)..(28): n stands for thymidine
  misc_feature (28)..(28): 3'-3 attached terminal deoxyabasic moeity
naugcuuuaucauauaugauaaagcaun

SEQ ID NO: 2483 - RNA, 29 nt, Artificial Sequence
  Description of Artificial Sequence:  siNA antisense region
  misc_feature (1)..(1): n stands for L-thymidine
  misc_feature (28)..(29): n stands for thymidine
  misc_feature (29)..(29): 3'-3 attached terminal deoxyabasic moeity
naugcuuuaucauauaugauaaagcaunn

SEQ ID NO: 2484 - RNA, 26 nt, Artificial Sequence
  Description of Artificial Sequence:  siNA antisense region
  misc_feature (1)..(1): n stands for L-thymidine
  misc_feature (26)..(26): 3'-3 attached terminal deoxyabasic moeity
naugcuuuaucauauaugauaaagca

SEQ ID NO: 2485 - RNA, 29 nt, Artificial Sequence
  Description of Artificial Sequence:  siNA antisense region
  misc_feature (1)..(1): n stands for L-thymidine
  misc_feature (29)..(29): 3'-3 attached terminal deoxyabasic moeity
naaugcuuuaucauauaucuauaagcauu

SEQ ID NO: 2486 - RNA, 29 nt, Artificial Sequence
  Description of Artificial Sequence:  siNA antisense region
  misc_feature (1)..(1): n stands for L-thymidine
  misc_feature (29)..(29): 3'-3 attached terminal deoxyabasic moeity
naaugcuuuuaguuauaugauaaagcauu

SEQ ID NO: 2487 - RNA, 29 nt, Artificial Sequence
  Description of Artificial Sequence:  siNA antisense region
  misc_feature (1)..(1): n stands for L-thymidine
  misc_feature (29)..(29): 3'-3 attached terminal deoxyabasic moeity
naauccuuaaucuuauuugauaaagcauu

SEQ ID NO: 2488 - RNA, 29 nt, Artificial Sequence
  Description of Artificial Sequence:  siNA antisense region
  misc_feature (1)..(1): n stands for L-thymidine
  misc_feature (4)..(4): 2'-deoxy-2'-fluoro
  misc_feature (6)..(9): 2'-deoxy-2'-fluoro
  misc_feature (11)..(12): 2'-deoxy-2'-fluoro
  misc_feature (14)..(14): 2'-deoxy-2'-fluoro
  misc_feature (16)..(16): 2'-deoxy-2'-fluoro
  misc_feature (18)..(18): 2'-deoxy-2'-fluoro
  misc_feature (21)..(21): 2'-deoxy-2'-fluoro
  misc_feature (26)..(26): 2'-deoxy-2'-fluoro
  misc_feature (28)..(29): 2'-deoxy-2'-fluoro
  misc_feature (29)..(29): 3'-3 attached terminal deoxyabasic moeity
naaugcuuuaucauauaugauaaagcauu

SEQ ID NO: 2489 - RNA, 29 nt, Artificial Sequence
  Description of Artificial Sequence:  siNA antisense region
  misc_feature (1)..(1): n stands for L-thymidine
  misc_feature (2)..(3): 2'-O-methyl
  misc_feature (4)..(4): 2'-deoxy-2'-fluoro
  misc_feature (5)..(5): 2'-O-methyl
  misc_feature (6)..(9): 2'-deoxy-2'-fluoro
  misc_feature (10)..(10): 2'-O-methyl
  misc_feature (11)..(12): 2'-deoxy-2'-fluoro
  misc_feature (13)..(13): 2'-O-methyl
  misc_feature (14)..(14): 2'-deoxy-2'-fluoro
  misc_feature (15)..(15): 2'-O-methyl
  misc_feature (16)..(16): 2'-deoxy-2'-fluoro
  misc_feature (17)..(17): 2'-O-methyl
  misc_feature (18)..(18): 2'-deoxy-2'-fluoro
  misc_feature (19)..(20): 2'-O-methyl
  misc_feature (21)..(21): 2'-deoxy-2'-fluoro
  misc_feature (22)..(25): 2'-O-methyl
  misc_feature (26)..(26): 2'-deoxy-2'-fluoro
  misc_feature (27)..(27): 2'-O-methyl
  misc_feature (28)..(29): 2'-deoxy-2'-fluoro
  misc_feature (29)..(29): 3'-3 attached terminal deoxyabasic moeity
naaugcuuuaucauauaugauaaagcauu

SEQ ID NO: 2490 - RNA, 21 nt, Artificial Sequence
  Description of Artificial Sequence:  siNA sense region
  misc_feature (1)..(1): 5'-3 attached terminal deoxyabasic moeity
  misc_feature (1)..(2): Phosphorothioate 3'-Internucleotide Linkage
  misc_feature (8)..(12): Phosphorothioate 3'-Internucleotide Linkage
  misc_feature (18)..(20): Phosphorothioate 3'-Internucleotide Linkage
  misc_feature (20)..(21): n stands for thymidine
  misc_feature (21)..(21): 3'-3 attached terminal deoxyabasic moeity
cugaguuuaaaaggcacccnn

SEQ ID NO: 2491 - RNA, 21 nt, Artificial Sequence
  Description of Artificial Sequence:  siNA antisense region
  misc_feature (3)..(7): Phosphorothioate 3'-Internucleotide Linkage
  misc_feature (13)..(17): Phosphorothioate 3'-Internucleotide Linkage
  misc_feature (20)..(21): n stands for thymidine
  misc_feature (20)..(21): Phosphorothioate 3'-Internucleotide Linkage
gggugccuuuuaaacucagnn

SEQ ID NO: 2492 - RNA, 21 nt, Artificial Sequence
  Description of Artificial Sequence:  siNA sense region
  misc_feature (1)..(2): Phosphorothioate 3'-Internucleotide Linkage
  misc_feature (1)..(1): 5'-3 attached terminal deoxyabasic moeity
  misc_feature (8)..(12): Phosphorothioate 3'-Internucleotide Linkage
  misc_feature (18)..(20): Phosphorothioate 3'-Internucleotide Linkage
  misc_feature (20)..(21): n stands for thymidine
  misc_feature (21)..(21): 3'-3 attached terminal deoxyabasic moeity
cccacggaaaauuugagucnn

SEQ ID NO: 2493 - RNA, 21 nt, Artificial Sequence
  Description of Artificial Sequence:  siNA antisense region
  misc_feature (3)..(7): Phosphorothioate 3'-Internucleotide Linkage
  misc_feature (13)..(17): Phosphorothioate 3'-Internucleotide Linkage
  misc_feature (20)..(21): n stands for thymidine
  misc_feature (20)..(20): Phosphorothioate 3'-Internucleotide Linkage
gacucaaauuuuccgugggnn

SEQ ID NO: 2494 - RNA, 21 nt, Artificial Sequence
  Description of Artificial Sequence:  siNA sense region
  misc_feature (1)..(1): 5'-3 attached terminal deoxyabasic moeity
  misc_feature (1)..(1): 2'-deoxy-2'-fluoro
  misc_feature (2)..(2): 2'-deoxy
  misc_feature (3)..(3): 2'-deoxy-2'-fluoro
  misc_feature (4)..(5): 2'-deoxy
  misc_feature (6)..(6): 2'-deoxy-2'-fluoro
  misc_feature (7)..(7): 2'-deoxy
  misc_feature (8)..(9): 2'-deoxy-2'-fluoro
  misc_feature (10)..(11): 2'-deoxy
  misc_feature (12)..(12): 2'-deoxy-2'-fluoro
  misc_feature (13)..(15): 2'-deoxy
  misc_feature (16)..(16): 2'-deoxy-2'-fluoro
  misc_feature (17)..(19): 2'-deoxy
  misc_feature (20)..(21): n stands for thymidine
  misc_feature (21)..(21): 3'-3 attached terminal deoxyabasic moeity
uaugaugccagcaaaugggnn

SEQ ID NO: 2495 - RNA, 21 nt, Artificial Sequence
  Description of Artificial Sequence:  siNA sense region
  misc_feature (1)..(1): 5'-3 attached terminal deoxyabasic moeity
  misc_feature (1)..(1): 2'-deoxy
  misc_feature (2)..(2): 2'-deoxy-2'-fluoro
  misc_feature (3)..(4): 2'-deoxy
  misc_feature (5)..(5): 2'-deoxy-2'-fluoro
  misc_feature (6)..(6): 2'-deoxy
  misc_feature (7)..(8): 2'-deoxy-2'-fluoro
  misc_feature (9)..(10): 2'-deoxy
  misc_feature (11)..(11): 2'-deoxy-2'-fluoro
  misc_feature (12)..(14): 2'-deoxy
  misc_feature (15)..(15): 2'-deoxy-2'-fluoro
  misc_feature (16)..(19): 2'-deoxy
  misc_feature (20)..(21): n stands for thymidine
  misc_feature (21)..(21): 5'-3 attached terminal deoxyabasic moeity
augaugccagcaaaugggann

SEQ ID NO: 2496 - RNA, 21 nt, Artificial Sequence
  Description of Artificial Sequence:  siNA sense region
  misc_feature (1)..(1): 5'-3 attached terminal deoxyabasic moeity
  misc_feature (1)..(1): 2'-deoxy
  misc_feature (2)..(3): 2'-deoxy-2'-fluoro
  misc_feature (4)..(4): 2'-deoxy
  misc_feature (5)..(5): 2'-deoxy-2'-fluoro
  misc_feature (6)..(6): 2'-deoxy
  misc_feature (7)..(8): 2'-deoxy-2'-fluoro
  misc_feature (9)..(11): 2'-deoxy
  misc_feature (12)..(13): 2'-deoxy-2'-fluoro
  misc_feature (14)..(14): 2'-deoxy
  misc_feature (15)..(16): 2'-deoxy-2'-fluoro
  misc_feature (17)..(18): 2'-deoxy
  misc_feature (19)..(19): 2'-deoxy-2'-fluoro
  misc_feature (20)..(21): n stands for thymidine
  misc_feature (21)..(21): 3'-3 attached terminal deoxyabasic moeity
accaugcuggacugcuggcnn

SEQ ID NO: 2497 - RNA, 21 nt, Artificial Sequence
  Description of Artificial Sequence:  siNA sense region
  misc_feature (1)..(1): 5'-3 attached terminal deoxyabasic moeity
  misc_feature (1)..(2): 2'-deoxy-2'-fluoro
  misc_feature (3)..(3): 2'-deoxy
  misc_feature (4)..(4): 2'-deoxy-2'-fluoro
  misc_feature (5)..(5): 2'-deoxy
  misc_feature (6)..(7): 2'-deoxy-2'-fluoro
  misc_feature (8)..(10): 2'-deoxy
  misc_feature (11)..(12): 2'-deoxy-2'-fluoro
  misc_feature (13)..(13): 2'-deoxy
  misc_feature (14)..(15): 2'-deoxy-2'-fluoro
  misc_feature (16)..(17): 2'-deoxy
  misc_feature (18)..(18): 2'-deoxy-2'-fluoro
  misc_feature (19)..(19): 2'-deoxy
  misc_feature (20)..(21): n stands for thymidine
  misc_feature (21)..(21): 3'-3 attached terminal deoxyabasic moeity
ccaugcuggacugcuggcann

SEQ ID NO: 2498 - RNA, 21 nt, Artificial Sequence
  Description of Artificial Sequence:  siNA antisense region
  misc_feature (1)..(3): 2'-deoxy-2'-fluoro
  misc_feature (4)..(4): 2'-O-methyl
  misc_feature (5)..(7): 2'-deoxy-2'-fluoro
  misc_feature (8)..(8): 2'-O-methyl
  misc_feature (9)..(10): 2'-deoxy-2'-fluoro
  misc_feature (11)..(12): 2'-O-methyl
  misc_feature (13)..(13): 2'-deoxy-2'-fluoro
  misc_feature (14)..(14): 2'-O-methyl
  misc_feature (15)..(16): 2'-deoxy-2'-fluoro
  misc_feature (17)..(17): 2'-O-methyl
  misc_feature (18)..(18): 2'-deoxy-2'-fluoro
  misc_feature (19)..(19): 2'-O-methyl
  misc_feature (20)..(21): n stands for thymidine
  misc_feature (20)..(20): Phosphorothioate 3'-Internucleotide Linkage
cccauuugcuggcaucauann

SEQ ID NO: 2499 - RNA, 21 nt, Artificial Sequence
  Description of Artificial Sequence:  siNA antisense region
  misc_feature (1)..(4): 2'-deoxy-2'-fluoro
  misc_feature (5)..(5): 2'-O-methyl
  misc_feature (6)..(8): 2'-deoxy-2'-fluoro
  misc_feature (9)..(9): 2'-O-methyl
  misc_feature (10)..(11): 2'-deoxy-2'-fluoro
  misc_feature (12)..(13): 2'-O-methyl
  misc_feature (14)..(14): 2'-deoxy-2'-fluoro
  misc_feature (15)..(15): 2'-O-methyl
  misc_feature (16)..(17): 2'-deoxy-2'-fluoro
  misc_feature (18)..(18): 2'-O-methyl
  misc_feature (19)..(19): 2'-deoxy-2'-fluoro
  misc_feature (20)..(21): n stands for thymidine
  misc_feature (20)..(20): Phosphorothioate 3'-Internucleotide Linkage
ucccauuugcuggcaucaunn

SEQ ID NO: 2500 - RNA, 21 nt, Artificial Sequence
  Description of Artificial Sequence:  siNA antisense region
  misc_feature (1)..(1): 2'-O-methyl
  misc_feature (2)..(3): 2'-deoxy-2'-fluoro
  misc_feature (4)..(5): 2'-O-methyl
  misc_feature (6)..(6): 2'-deoxy-2'-fluoro
  misc_feature (7)..(8): 2'-O-methyl
  misc_feature (9)..(11): 2'-deoxy-2'-fluoro
  misc_feature (12)..(13): 2'-O-methyl
  misc_feature (14)..(14): 2'-deoxy-2'-fluoro
  misc_feature (15)..(15): 2'-O-methyl
  misc_feature (16)..(16): 2'-deoxy-2'-fluoro
  misc_feature (17)..(18): 2'-O-methyl
  misc_feature (19)..(19): 2'-deoxy-2'-fluoro
  misc_feature (20)..(21): n stands for thymidine
  misc_feature (20)..(20): Phosphorothioate 3'-Internucleotide Linkage
gccagcaguccagcauggunn

SEQ ID NO: 2501 - RNA, 21 nt, Artificial Sequence
  Description of Artificial Sequence:  siNA antisense region
  misc_feature (1)..(1): 2'-deoxy-2'-fluoro
  misc_feature (2)..(2): 2'-O-methyl
  misc_feature (3)..(4): 2'-deoxy-2'-fluoro
  misc_feature (5)..(6): 2'-O-methyl
  misc_feature (7)..(7): 2'-deoxy-2'-fluoro
  misc_feature (8)..(9): 2'-O-methyl
  misc_feature (10)..(12): 2'-deoxy-2'-fluoro
  misc_feature (13)..(14): 2'-O-methyl
  misc_feature (15)..(15): 2'-deoxy-2'-fluoro
  misc_feature (16)..(16): 2'-O-methyl
  misc_feature (17)..(17): 2'-deoxy-2'-fluoro
  misc_feature (18)..(19): 2'-O-methyl
  misc_feature (20)..(21): n stands for thymidine
  misc_feature (20)..(20): Phosphorothioate 3'-Internucleotide Linkage
ugccagcaguccagcauggnn

SEQ ID NO: 2502 - RNA, 21 nt, Artificial Sequence
  Description of Artificial Sequence:  siNA sense region
  misc_feature (1)..(1): 5'-3 attached terminal deoxyabasic moeity
  misc_feature (20)..(21): n stands for thymidine
  misc_feature (21)..(21): 3'-3 attached terminal deoxyabasic moeity
uaugaugccagcaaaugggnn

SEQ ID NO: 2503 - RNA, 21 nt, Artificial Sequence
  Description of Artificial Sequence:  siNA sense region
  misc_feature (1)..(1): 5'-3 attached terminal deoxyabasic moeity
  misc_feature (20)..(21): n stands for thymidine
  misc_feature (21)..(21): 3'-3 attached terminal deoxyabasic moeity
augaugccagcaaaugggann

SEQ ID NO: 2504 - RNA, 21 nt, Artificial Sequence
  Description of Artificial Sequence:  siNA sense region
  misc_feature (1)..(1): 5'-3 attached terminal deoxyabasic moeity
  misc_feature (20)..(21): n stands for thymidine
  misc_feature (21)..(21): 3'-3 attached terminal deoxyabasic moeity
accaugcuggacugcuggcnn

SEQ ID NO: 2505 - RNA, 21 nt, Artificial Sequence
  Description of Artificial Sequence:  siNA sense region
  misc_feature (1)..(1): 5'-3 attached terminal deoxyabasic moeity
  misc_feature (20)..(21): n stands for thymidine
  misc_feature (21)..(21): 3'-3 attached terminal deoxyabasic moeity
ccaugcuggacugcuggcann

SEQ ID NO: 2506 - RNA, 21 nt, Artificial Sequence
  Description of Artificial Sequence:  siNA antisense region
  misc_feature (20)..(21): n stands for thymidine
  misc_feature (20)..(20): Phosphorothioate 3'-Internucleotide Linkage
cccauuugcuggcaucauann

SEQ ID NO: 2507 - RNA, 21 nt, Artificial Sequence
  Description of Artificial Sequence:  siNA antisense region
  misc_feature (20)..(21): n stands for thymidine
  misc_feature (20)..(20): Phosphorothioate 3'-Internucleotide Linkage
ucccauuugcuggcaucaunn

SEQ ID NO: 2508 - RNA, 21 nt, Artificial Sequence
  Description of Artificial Sequence:  siNA antisense region
  misc_feature (20)..(21): n stands for thymidine
  misc_feature (20)..(20): Phosphorothioate 3'-Internucleotide Linkage
gccagcaguccagcauggunn

SEQ ID NO: 2509 - RNA, 21 nt, Artificial Sequence
  Description of Artificial Sequence:  siNA antisense region
  misc_feature (20)..(21): n stands for thymidine
  misc_feature (20)..(20): Phosphorothioate 3'-Internucleotide Linkage
ugccagcaguccagcauggnn

SEQ ID NO: 2510 - RNA, 21 nt, Artificial Sequence
  Description of Artificial Sequence:  siNA sense region
  misc_feature (1)..(1): 5'-3 attached terminal deoxyabasic moeity
  misc_feature (1)..(3): 2'-deoxy
  misc_feature (4)..(4): 2'-deoxy-2'-fluoro
  misc_feature (5)..(7): 2'-deoxy
  misc_feature (8)..(8): 2'-deoxy-2'-fluoro
  misc_feature (9)..(10): 2'-deoxy
  misc_feature (11)..(12): 2'-deoxy-2'-fluoro
  misc_feature (13)..(13): 2'-deoxy
  misc_feature (14)..(14): 2'-deoxy-2'-fluoro
  misc_feature (15)..(16): 2'-deoxy
  misc_feature (17)..(17): 2'-deoxy-2'-fluoro
  misc_feature (18)..(18): 2'-deoxy
  misc_feature (19)..(19): 2'-deoxy-2'-fluoro
  misc_feature (20)..(21): n stands for thymidine
  misc_feature (21)..(21): 3'-3 attached terminal deoxyabasic moeity
ggguaaacgaccguaguaunn

SEQ ID NO: 2511 - RNA, 21 nt, Artificial Sequence
  Description of Artificial Sequence:  siNA sense region
  misc_feature (1)..(1): 5'-3 attached terminal deoxyabasic moeity
  misc_feature (1)..(4): 2'-deoxy
  misc_feature (5)..(5): 2'-deoxy-2'-fluoro
  misc_feature (6)..(8): 2'-deoxy
  misc_feature (9)..(9): 2'-deoxy-2'-fluoro
  misc_feature (10)..(11): 2'-deoxy
  misc_feature (12)..(13): 2'-deoxy-2'-fluoro
  misc_feature (14)..(14): 2'-deoxy
  misc_feature (15)..(15): 2'-deoxy-2'-fluoro
  misc_feature (16)..(17): 2'-deoxy
  misc_feature (18)..(18): 2'-deoxy-2'-fluoro
  misc_feature (19)..(19): 2'-deoxy
  misc_feature (20)..(21): n stands for thymidine
  misc_feature (21)..(21): 3'-3 attached terminal deoxyabasic moeity
aggguaaacgaccguaguann

SEQ ID NO: 2512 - RNA, 21 nt, Artificial Sequence
  Description of Artificial Sequence:  siNA sense region
  misc_feature (1)..(1): 5'-3 attached terminal deoxyabasic moeity
  misc_feature (1)..(1): 2'-deoxy-2'-fluoro
  misc_feature (2)..(3): 2'-deoxy
  misc_feature (4)..(5): 2'-deoxy-2'-fluoro
  misc_feature (6)..(6): 2'-deoxy
  misc_feature (7)..(8): 2'-deoxy-2'-fluoro
  misc_feature (9)..(11): 2'-deoxy
  misc_feature (12)..(13): 2'-deoxy-2'-fluoro
  misc_feature (14)..(14): 2'-deoxy
  misc_feature (15)..(15): 2'-deoxy-2'-fluoro
  misc_feature (16)..(16): 2'-deoxy
  misc_feature (17)..(18): 2'-deoxy-2'-fluoro
  misc_feature (20)..(21): n stands for thymidine
  misc_feature (21)..(21): 3'-3 attached terminal deoxyabasic moeity
cggucgucaggucguaccann

SEQ ID NO: 2513 - RNA, 21 nt, Artificial Sequence
  Description of Artificial Sequence:  siNA sense region
  misc_feature (1)..(1): 5'-3 attached terminal deoxyabasic moeity
  misc_feature (1)..(1): 2'-deoxy
  misc_feature (2)..(2): 2'-deoxy-2'-fluoro
  misc_feature (3)..(4): 2'-deoxy
  misc_feature (5)..(6): 2'-deoxy-2'-fluoro
  misc_feature (7)..(7): 2'-deoxy
  misc_feature (8)..(9): 2'-deoxy-2'-fluoro
  misc_feature (10)..(12): 2'-deoxy
  misc_feature (13)..(14): 2'-deoxy-2'-fluoro
  misc_feature (15)..(15): 2'-deoxy
  misc_feature (16)..(16): 2'-deoxy-2'-fluoro
  misc_feature (17)..(17): 2'-deoxy
  misc_feature (18)..(19): 2'-deoxy-2'-fluoro
  misc_feature (20)..(21): n stands for thymidine
  misc_feature (21)..(21): 3'-3 attached terminal deoxyabasic moeity
acggucgucaggucguaccnn

SEQ ID NO: 2514 - RNA, 21 nt, Artificial Sequence
  Description of Artificial Sequence:  siNA antisense region
  misc_feature (1)..(1): 2'-O-methyl
  misc_feature (2)..(2): 2'-deoxy-2'-fluoro
  misc_feature (3)..(3): 2'-O-methyl
  misc_feature (4)..(5): 2'-deoxy-2'-fluoro
  misc_feature (6)..(6): 2'-O-methyl
  misc_feature (7)..(7): 2'-deoxy-2'-fluoro
  misc_feature (8)..(9): 2'-O-methyl
  misc_feature (10)..(11): 2'-deoxy-2'-fluoro
  misc_feature (12)..(12): 2'-O-methyl
  misc_feature (13)..(15): 2'-deoxy-2'-fluoro
  misc_feature (16)..(16): 2'-O-methyl
  misc_feature (17)..(19): 2'-deoxy-2'-fluoro
  misc_feature (20)..(21): n stands for thymidine
  misc_feature (20)..(20): Phosphorothioate 3'-Internucleotide Linkage
auacuacggucguuuacccnn

SEQ ID NO: 2515 - RNA, 21 nt, Artificial Sequence
  Description of Artificial Sequence:  siNA antisense region
  misc_feature (1)..(1): 2'-deoxy-2'-fluoro
  misc_feature (2)..(2): 2'-O-methyl
  misc_feature (3)..(4): 2'-deoxy-2'-fluoro
  misc_feature (5)..(5): 2'-O-methyl
  misc_feature (6)..(6): 2'-deoxy-2'-fluoro
  misc_feature (7)..(8): 2'-O-methyl
  misc_feature (9)..(10): 2'-deoxy-2'-fluoro
  misc_feature (11)..(11): 2'-O-methyl
  misc_feature (12)..(14): 2'-deoxy-2'-fluoro
  misc_feature (15)..(15): 2'-O-methyl
  misc_feature (16)..(19): 2'-deoxy-2'-fluoro
  misc_feature (20)..(21): n stands for thymidine
  misc_feature (20)..(20): Phosphorothioate 3'-Internucleotide Linkage
uacuacggucguuuacccunn

SEQ ID NO: 2516 - RNA, 21 nt, Artificial Sequence
  Description of Artificial Sequence:  siNA antisense region
  misc_feature (1)..(1): 2'-deoxy-2'-fluoro
  misc_feature (2)..(3): 2'-O-methyl
  misc_feature (4)..(4): 2'-deoxy-2'-fluoro
  misc_feature (5)..(5): 2'-O-methyl
  misc_feature (6)..(6): 2'-deoxy-2'-fluoro
  misc_feature (7)..(8): 2'-O-methyl
  misc_feature (9)..(11): 2'-deoxy-2'-fluoro
  misc_feature (12)..(13): 2'-O-methyl
  misc_feature (14)..(14): 2'-deoxy-2'-fluoro
  misc_feature (15)..(16): 2'-O-methyl
  misc_feature (17)..(18): 2'-deoxy-2'-fluoro
  misc_feature (19)..(19): 2'-O-methyl
  misc_feature (20)..(21): n stands for thymidine
  misc_feature (20)..(20): Phosphorothioate 3'-Internucleotide Linkage
ugguacgaccugacgaccgnn

SEQ ID NO: 2517 - RNA, 21 nt, Artificial Sequence
  Description of Artificial Sequence:  siNA antisense region
  misc_feature (1)..(2): 2'-O-methyl
  misc_feature (3)..(3): 2'-deoxy-2'-fluoro
  misc_feature (4)..(4): 2'-O-methyl
  misc_feature (5)..(5): 2'-deoxy-2'-fluoro
  misc_feature (6)..(7): 2'-O-methyl
  misc_feature (8)..(10): 2'-deoxy-2'-fluoro
  misc_feature (11)..(12): 2'-O-methyl
  misc_feature (13)..(13): 2'-deoxy-2'-fluoro
  misc_feature (14)..(15): 2'-O-methyl
  misc_feature (16)..(17): 2'-deoxy-2'-fluoro
  misc_feature (18)..(18): 2'-O-methyl
  misc_feature (19)..(19): 2'-deoxy-2'-fluoro
  misc_feature (20)..(21): n stands for thymidine
  misc_feature (20)..(20): Phosphorothioate 3'-Internucleotide Linkage
gguacgaccugacgaccgunn

SEQ ID NO: 2518 - RNA, 21 nt, Artificial Sequence
  Description of Artificial Sequence:  siNA sense region
  misc_feature (1)..(1): 5'-3 attached terminal deoxyabasic moeity
  misc_feature (20)..(21): n stands for thymidine
  misc_feature (21)..(21): 3'-3 attached terminal deoxyabasic moeity
ggguaaacgaccguaguaunn

SEQ ID NO: 2519 - RNA, 21 nt, Artificial Sequence
  Description of Artificial Sequence:  siNA sense region
  misc_feature (1)..(1): 5'-3 attached terminal deoxyabasic moeity
  misc_feature (20)..(21): n stands for thymidine
  misc_feature (21)..(21): 3'-3 attached terminal deoxyabasic moeity
aggguaaacgaccguaguann

SEQ ID NO: 2520 - RNA, 21 nt, Artificial Sequence
  Description of Artificial Sequence:  siNA sense region
  misc_feature (1)..(1): 5'-3 attached terminal deoxyabasic moeity
  misc_feature (20)..(21): n stands for thymidine
  misc_feature (21)..(21): 3'-3 attached terminal deoxyabasic moeity
cggucgucaggucguaccann

SEQ ID NO: 2521 - RNA, 21 nt, Artificial Sequence
  Description of Artificial Sequence:  siNA sense region
  misc_feature (1)..(1): 5'-3 attached terminal deoxyabasic moeity
  misc_feature (20)..(21): n stands for thymidine
  misc_feature (21)..(21): 3'-3 attached terminal deoxyabasic moeity
acggucgucaggucguaccnn

SEQ ID NO: 2522 - RNA, 21 nt, Artificial Sequence
  Description of Artificial Sequence:  siNA antisense region
  misc_feature (20)..(21): n stands for thymidine
  misc_feature (20)..(20): Phosphorothioate 3'-Internucleotide Linkage
auacuacggucguuuacccnn

SEQ ID NO: 2523 - RNA, 21 nt, Artificial Sequence
  Description of Artificial Sequence:  siNA antisense region
  misc_feature (20)..(21): n stands for thymidine
  misc_feature (20)..(20): Phosphorothioate 3'-Internucleotide Linkage
uacuacggucguuuacccunn

SEQ ID NO: 2524 - RNA, 21 nt, Artificial Sequence
  Description of Artificial Sequence:  siNA antisense region
  misc_feature (20)..(21): n stands for thymidine
  misc_feature (20)..(20): Phosphorothioate 3'-Internucleotide Linkage
ugguacgaccugacgaccgnn

SEQ ID NO: 2525 - RNA, 21 nt, Artificial Sequence
  Description of Artificial Sequence:  siNA antisense region
  misc_feature (20)..(21): n stands for thymidine
  misc_feature (20)..(20): Phosphorothioate 3'-Internucleotide Linkage
gguacgaccugacgaccgunn

SEQ ID NO: 2526 - RNA, 21 nt, Artificial Sequence
  Description of Artificial Sequence:  siNA sense region
  misc_feature (1)..(1): 5'-3 attached terminal deoxyabasic moeity
  misc_feature (20)..(21): n stands for thymidine
  misc_feature (21)..(21): 3'-3 attached terminal deoxyabasic moeity
gccauguacaaguguguggnn

SEQ ID NO: 2527 - RNA, 21 nt, Artificial Sequence
  Description of Artificial Sequence:  siNA sense region
  misc_feature (1)..(1): 5'-3 attached terminal deoxyabasic moeity
  misc_feature (20)..(21): n stands for thymidine
  misc_feature (21)..(21): 3'-3 attached terminal deoxyabasic moeity
uucuaugugaccaccauccnn

SEQ ID NO: 2528 - RNA, 21 nt, Artificial Sequence
  Description of Artificial Sequence:  siNA sense region
  misc_feature (1)..(1): 5'-3 attached terminal deoxyabasic moeity
  misc_feature (20)..(21): n stands for thymidine
  misc_feature (21)..(21): 3'-3 attached terminal deoxyabasic moeity
agcacugccacaagaaguann

SEQ ID NO: 2529 - RNA, 21 nt, Artificial Sequence
  Description of Artificial Sequence:  siNA sense region
  misc_feature (1)..(1): 5'-3 attached terminal deoxyabasic moeity
  misc_feature (20)..(21): n stands for thymidine
  misc_feature (21)..(21): 3'-3 attached terminal deoxyabasic moeity
cacugccacaagaaguaccnn

SEQ ID NO: 2530 - RNA, 21 nt, Artificial Sequence
  Description of Artificial Sequence:  siNA sense region
  misc_feature (1)..(1): 5'-3 attached terminal deoxyabasic moeity
  misc_feature (20)..(21): n stands for thymidine
  misc_feature (21)..(21): 3'-3 attached terminal deoxyabasic moeity
ugccacaagaaguaccugunn

SEQ ID NO: 2531 - RNA, 21 nt, Artificial Sequence
  Description of Artificial Sequence:  siNA sense region
  misc_feature (1)..(1): 5'-3 attached terminal deoxyabasic moeity
  misc_feature (20)..(21): n stands for thymidine
  misc_feature (21)..(21): 3'-3 attached terminal deoxyabasic moeity
uacggcaaccucuccaacunn

SEQ ID NO: 2532 - RNA, 21 nt, Artificial Sequence
  Description of Artificial Sequence:  siNA sense region
  misc_feature (1)..(1): 5'-3 attached terminal deoxyabasic moeity
  misc_feature (20)..(21): n stands for thymidine
  misc_feature (21)..(21): 3'-3 attached terminal deoxyabasic moeity
gugaagaucugugacuuugnn

SEQ ID NO: 2533 - RNA, 21 nt, Artificial Sequence
  Description of Artificial Sequence:  siNA sense region
  misc_feature (1)..(1): 5'-3 attached terminal deoxyabasic moeity
  misc_feature (20)..(21): n stands for thymidine
  misc_feature (21)..(21): 3'-3 attached terminal deoxyabasic moeity
agaucugugacuuuggccunn

SEQ ID NO: 2534 - RNA, 21 nt, Artificial Sequence
  Description of Artificial Sequence:  siNA antisense region
  misc_feature (20)..(21): n stands for thymidine
  misc_feature (20)..(20): Phosphorothioate 3'-Internucleotide Linkage
ccacacacuuguacauggcnn

SEQ ID NO: 2535 - RNA, 21 nt, Artificial Sequence
  Description of Artificial Sequence:  siNA antisense region
  misc_feature (20)..(21): n stands for thymidine
  misc_feature (20)..(20): Phosphorothioate 3'-Internucleotide Linkage
ggaugguggucacauagaann

SEQ ID NO: 2536 - RNA, 21 nt, Artificial Sequence
  Description of Artificial Sequence:  siNA antisense region
  misc_feature (20)..(21): n stands for thymidine
  misc_feature (20)..(20): Phosphorothioate 3'-Internucleotide Linkage
uacuucuuguggcagugcunn

SEQ ID NO: 2537 - RNA, 21 nt, Artificial Sequence
  Description of Artificial Sequence:  siNA antisense region
  misc_feature (20)..(21): n stands for thymidine
  misc_feature (20)..(20): Phosphorothioate 3'-Internucleotide Linkage
gguacuucuuguggcagugnn

SEQ ID NO: 2538 - RNA, 21 nt, Artificial Sequence
  Description of Artificial Sequence:  siNA antisense region
  misc_feature (20)..(21): n stands for thymidine
  misc_feature (20)..(20): Phosphorothioate 3'-Internucleotide Linkage
acagguacuucuuguggcann

SEQ ID NO: 2539 - RNA, 21 nt, Artificial Sequence
  Description of Artificial Sequence:  siNA antisense region
  misc_feature (20)..(21): n stands for thymidine
  misc_feature (20)..(20): Phosphorothioate 3'-Internucleotide Linkage
aguuggagagguugccguann

SEQ ID NO: 2540 - RNA, 21 nt, Artificial Sequence
  Description of Artificial Sequence:  siNA antisense region
  misc_feature (20)..(21): n stands for thymidine
  misc_feature (20)..(20): Phosphorothioate 3'-Internucleotide Linkage
caaagucacagaucuucacnn

SEQ ID NO: 2541 - RNA, 21 nt, Artificial Sequence
  Description of Artificial Sequence:  siNA antisense region
  misc_feature (20)..(21): n stands for thymidine
  misc_feature (20)..(20): Phosphorothioate 3'-Internucleotide Linkage
aggccaaagucacagaucunn

SEQ ID NO: 2542 - RNA, 21 nt, Artificial Sequence
  Description of Artificial Sequence:  siNA antisense region
  misc_feature (1)..(2): 2'-deoxy-2'-fluoro
  misc_feature (3)..(3): 2'-O-methyl
  misc_feature (4)..(4): 2'-deoxy-2'-fluoro
  misc_feature (5)..(5): 2'-O-methyl
  misc_feature (6)..(6): 2'-deoxy-2'-fluoro
  misc_feature (7)..(7): 2'-O-methyl
  misc_feature (8)..(10): 2'-deoxy-2'-fluoro
  misc_feature (11)..(11): 2'-O-methyl
  misc_feature (12)..(12): 2'-deoxy-2'-fluoro
  misc_feature (13)..(13): 2'-O-methyl
  misc_feature (14)..(14): 2'-deoxy-2'-fluoro
  misc_feature (15)..(15): 2'-O-methyl
  misc_feature (16)..(16): 2'-deoxy-2'-fluoro
  misc_feature (17)..(18): 2'-O-methyl
  misc_feature (19)..(19): 2'-deoxy-2'-fluoro
  misc_feature (20)..(21): n stands for thymidine
  misc_feature (20)..(20): Phosphorothioate 3'-Internucleotide Linkage
ccacacacuuguacauggcnn

SEQ ID NO: 2543 - RNA, 21 nt, Artificial Sequence
  Description of Artificial Sequence:  siNA antisense region
  misc_feature (1)..(3): 2'-O-methyl
  misc_feature (4)..(4): 2'-deoxy-2'-fluoro
  misc_feature (5)..(6): 2'-O-methyl
  misc_feature (7)..(7): 2'-deoxy-2'-fluoro
  misc_feature (8)..(9): 2'-O-methyl
  misc_feature (10)..(11): 2'-deoxy-2'-fluoro
  misc_feature (12)..(12): 2'-O-methyl
  misc_feature (13)..(13): 2'-deoxy-2'-fluoro
  misc_feature (14)..(14): 2'-O-methyl
  misc_feature (15)..(15): 2'-deoxy-2'-fluoro
  misc_feature (16)..(19): 2'-O-methyl
  misc_feature (20)..(21): n stands for thymidine
  misc_feature (20)..(20): Phosphorothioate 3'-Internucleotide Linkage
ggaugguggucacauagaann

SEQ ID NO: 2544 - RNA, 21 nt, Artificial Sequence
  Description of Artificial Sequence:  siNA antisense region
  misc_feature (1)..(1): 2'-deoxy-2'-fluoro
  misc_feature (2)..(2): 2'-O-methyl
  misc_feature (3)..(8): 2'-deoxy-2'-fluoro
  misc_feature (9)..(9): 2'-O-methyl
  misc_feature (10)..(10): 2'-deoxy-2'-fluoro
  misc_feature (11)..(12): 2'-O-methyl
  misc_feature (13)..(13): 2'-deoxy-2'-fluoro
  misc_feature (14)..(15): 2'-O-methyl
  misc_feature (16)..(16): 2'-deoxy-2'-fluoro
  misc_feature (17)..(17): 2'-O-methyl
  misc_feature (18)..(19): 2'-deoxy-2'-fluoro
  misc_feature (20)..(21): n stands for thymidine
  misc_feature (20)..(20): Phosphorothioate 3'-Internucleotide Linkage
uacuucuuguggcagugcunn

SEQ ID NO: 2545 - RNA, 21 nt, Artificial Sequence
  Description of Artificial Sequence:  siNA antisense region
  misc_feature (1)..(2): 2'-O-methyl
  misc_feature (3)..(3): 2'-deoxy-2'-fluoro
  misc_feature (4)..(4): 2'-O-methyl
  misc_feature (5)..(10): 2'-deoxy-2'-fluoro
  misc_feature (11)..(11): 2'-O-methyl
  misc_feature (12)..(12): 2'-deoxy-2'-fluoro
  misc_feature (13)..(14): 2'-O-methyl
  misc_feature (15)..(15): 2'-deoxy-2'-fluoro
  misc_feature (16)..(17): 2'-O-methyl
  misc_feature (18)..(18): 2'-deoxy-2'-fluoro
  misc_feature (19)..(19): 2'-O-methyl
  misc_feature (20)..(21): n stands for thymidine
  misc_feature (20)..(20): Phosphorothioate 3'-Internucleotide Linkage
gguacuucuuguggcagugnn

SEQ ID NO: 2546 - RNA, 21 nt, Artificial Sequence
  Description of Artificial Sequence:  siNA antisense region
  misc_feature (1)..(1): 2'-O-methyl
  misc_feature (2)..(2): 2'-deoxy-2'-fluoro
  misc_feature (3)..(5): 2'-O-methyl
  misc_feature (6)..(6): 2'-deoxy-2'-fluoro
  misc_feature (7)..(7): 2'-O-methyl
  misc_feature (8)..(13): 2'-deoxy-2'-fluoro
  misc_feature (14)..(14): 2'-O-methyl
  misc_feature (15)..(15): 2'-deoxy-2'-fluoro
  misc_feature (16)..(17): 2'-O-methyl
  misc_feature (18)..(18): 2'-deoxy-2'-fluoro
  misc_feature (19)..(19): 2'-O-methyl
  misc_feature (20)..(21): n stands for thymidine
  misc_feature (20)..(20): Phosphorothioate 3'-Internucleotide Linkage
acagguacuucuuguggcann

SEQ ID NO: 2547 - RNA, 21 nt, Artificial Sequence
  Description of Artificial Sequence:  siNA antisense region
  misc_feature (1)..(2): 2'-O-methyl
  misc_feature (3)..(4): 2'-deoxy-2'-fluoro
  misc_feature (5)..(11): 2'-O-methyl
  misc_feature (12)..(13): 2'-deoxy-2'-fluoro
  misc_feature (14)..(14): 2'-O-methyl
  misc_feature (15)..(16): 2'-deoxy-2'-fluoro
  misc_feature (17)..(17): 2'-O-methyl
  misc_feature (18)..(18): 2'-deoxy-2'-fluoro
  misc_feature (19)..(19): 2'-O-methyl
  misc_feature (20)..(21): n stands for thymidine
  misc_feature (20)..(20): Phosphorothioate 3'-Internucleotide Linkage
aguuggagagguugccguann

SEQ ID NO: 2548 - RNA, 21 nt, Artificial Sequence
  Description of Artificial Sequence:  siNA sense region
  misc_feature (1)..(1): 2'-deoxy-2'-fluoro
  misc_feature (2)..(5): 2'-O-methyl
  misc_feature (6)..(7): 2'-deoxy-2'-fluoro
  misc_feature (8)..(8): 2'-O-methyl
  misc_feature (9)..(9): 2'-deoxy-2'-fluoro
  misc_feature (10)..(12): 2'-O-methyl
  misc_feature (13)..(17): 2'-deoxy-2'-fluoro
  misc_feature (18)..(18): 2'-O-methyl
  misc_feature (19)..(19): 2'-deoxy-2'-fluoro
  misc_feature (20)..(20): Phosphorothioate 3'-Internucleotide Linkage
  misc_feature (20)..(21): n stands for thymidine
caaagucacagaucuucacnn

SEQ ID NO: 2549 - RNA, 21 nt, Artificial Sequence
  Description of Artificial Sequence:  siNA antisense region
  misc_feature (1)..(3): 2'-O-methyl
  misc_feature (4)..(5): 2'-deoxy-2'-fluoro
  misc_feature (6)..(9): 2'-O-methyl
  misc_feature (10)..(11): 2'-deoxy-2'-fluoro
  misc_feature (12)..(12): 2'-O-methyl
  misc_feature (13)..(13): 2'-deoxy-2'-fluoro
  misc_feature (14)..(16): 2'-O-methyl
  misc_feature (17)..(19): 2'-deoxy-2'-fluoro
  misc_feature (20)..(21): n stands for thymidine
  misc_feature (20)..(20): Phosphorothioate 3'-Internucleotide Linkage
aggccaaagucacagaucunn

SEQ ID NO: 2550 - DNA, 20 bp, Artificial Sequence
  PCR Primer
aagatgccagccgaaggaga

SEQ ID NO: 2551 - DNA, 19 bp, Artificial Sequence
  PCR Primer
ggctcggcacctatagaca

SEQ ID NO: 2552 - DNA, 20 bp, Artificial Sequence
  PCR Primer
cactgcaaacggggaaatgg

SEQ ID NO: 2553 - DNA, 20 bp, Artificial Sequence
  PCR Primer
tgagatggactgtcggatgg

SEQ ID NO: 2554 - RNA, 21 nt, Artificial Sequence
  Description of Artificial Sequence:  siNA sense region
  misc_feature (1)..(1): 5'-3 attached terminal deoxyabasic moeity
  misc_feature (21)..(21): 3'-3 attached terminal deoxyabasic moeity
  misc_feature (20)..(21): n stands for any nucleotide
nnnnnnnnnnnnnnnnnnnnn

SEQ ID NO: 2555 - RNA, 21 nt, Artificial Sequence
  Description of Artificial Sequence:  siNA antisense region
  misc_feature (20)..(20): Optional Phosphorothioate 3'-Internucleotide Linkage
  misc_feature (20)..(21): n stands for any nucleotide
  misc_feature (21)..(21): Optional 3'-3 attached terminal glyceryl moeity
nnnnnnnnnnnnnnnnnnnnn

SEQ ID NO: 2556 - RNA, 21 nt, Artificial Sequence
  Description of Artificial Sequence:  siNA sense region
  misc_feature (1)..(19): n stands for any nucleotide wherein any pyrimidine nucleotide present is 2'-Fluoro and any purine nucleotide present is 2'-O-methyl
  misc_feature (20)..(20): Optional Phosphorothioate 3'-Internucleotide Linkage
  misc_feature (20)..(21): n stands for any nucleotide
nnnnnnnnnnnnnnnnnnnnn

SEQ ID NO: 2557 - RNA, 21 nt, Artificial Sequence
  Description of Artificial Sequence:  siNA antisense region
  misc_feature (1)..(19): n stands for any nucleotide wherein any pyrimidine nucleotide present is 2'-Fluoro and any purine nucleotide present is 2'-O-methyl
  misc_feature (20)..(20): Optional Phosphorothioate 3'-Internucleotide Linkage
  misc_feature (20)..(21): n stands for any nucleotide
  misc_feature (21)..(21): Optional 3'-3 attached terminal glyceryl moeity
nnnnnnnnnnnnnnnnnnnnn

SEQ ID NO: 2558 - RNA, 21 nt, Artificial Sequence
  Description of Artificial Sequence:  siNA sense region
  misc_feature (1)..(19): n stands for any nucleotide wherein any pyrimidine nucleotide present is 2'-O-methyl or 2'-Fluoro
  misc_feature (20)..(21): n stands for any nucleotide
  misc_feature (1)..(1): 5'-3 attached terminal deoxyabasic moeity
  misc_feature (21)..(21): 3'-3 attached terminal deoxyabasic moeity
nnnnnnnnnnnnnnnnnnnnn

SEQ ID NO: 2559 - RNA, 21 nt, Artificial Sequence
  Description of Artificial Sequence:  siNA antisense region
  misc_feature (1)..(19): n stands for any nucleotide wherein any pyrimidine nucleotide present is 2'-Fluoro
  misc_feature (20)..(20): Optional Phosphorothioate 3'-Internucleotide Linkage
  misc_feature (20)..(21): n stands for any nucleotide
  misc_feature (21)..(21): Optional 3'-3 attached terminal glyceryl moeity
nnnnnnnnnnnnnnnnnnnnn

SEQ ID NO: 2560 - RNA, 21 nt, Artificial Sequence
  Description of Artificial Sequence:  siNA sense region
  misc_feature (1)..(19): n stands for any nucleotide wherein any pyrimidine nucleotide present is 2'-Fluoro and any purine nucleotide present is 2'-Deoxy
  misc_feature (20)..(21): n stands for any nucleotide
  misc_feature (1)..(1): 5'-3 attached terminal deoxyabasic moeity
  misc_feature (21)..(21): 3'-3 attached terminal deoxyabasic moeity
nnnnnnnnnnnnnnnnnnnnn

SEQ ID NO: 2561 - RNA, 21 nt, Artificial Sequence
  Description of Artificial Sequence:  siNA sense region
  misc_feature (1)..(19): n stands for any nucleotide wherein any pyrimidine nucleotide present is 2'-Fluoro
  misc_feature (20)..(21): n stands for any nucleotide
  misc_feature (1)..(1): 5'-3 attached terminal deoxyabasic moeity
  misc_feature (21)..(21): 3'-3 attached terminal deoxyabasic moeity
nnnnnnnnnnnnnnnnnnnnn

SEQ ID NO: 2562 - RNA, 21 nt, Artificial Sequence
  Description of Artificial Sequence:  siNA antisense region
  misc_feature (1)..(19): n stands for any nucleotide wherein any pyrimidine nucleotide present is 2'-Fluoro and any purine nucleotide present is 2'-Deoxy
  misc_feature (20)..(20): Optional Phosphorothioate 3'-Internucleotide Linkage
  misc_feature (20)..(21): n stands for any nucleotide
  misc_feature (21)..(21): Optional 3'-3 attached terminal glyceryl moeity
nnnnnnnnnnnnnnnnnnnnn

SEQ ID NO: 2563 - RNA, 21 nt, Artificial Sequence
  Description of Artificial Sequence:  siNA sense region
  misc_feature (1)..(1): 5'-3 attached terminal deoxyabasic moeity
  misc_feature (21)..(21): 3'-3 attached terminal deoxyabasic moeity
  misc_feature (20)..(21): n stands for thymidine
ucugaugaugucagauaugnn

SEQ ID NO: 2564 - RNA, 21 nt, Artificial Sequence
  Description of Artificial Sequence:  siNA antisense region
  misc_feature (20)..(20): Phosphorothioate 3'-Internucleotide Linkage
  misc_feature (20)..(21): n stands for thymidine
  misc_feature (21)..(21): 3'-3 attached terminal glyceryl moeity
cauaucugacaucaucagann

SEQ ID NO: 2565 - RNA, 21 nt, Artificial Sequence
  Description of Artificial Sequence:  siNA sense region
  misc_feature (1)..(3): 2'-deoxy-2'-fluoro
  misc_feature (4)..(5): 2'-O-Methyl
  misc_feature (6)..(6): 2'-deoxy-2'-fluoro
  misc_feature (7)..(8): 2'-O-Methyl
  misc_feature (9)..(9): 2'-deoxy-2'-fluoro
  misc_feature (10)..(10): 2'-O-Methyl
  misc_feature (11)..(12): 2'-deoxy-2'-fluoro
  misc_feature (13)..(15): 2'-O-Methyl
  misc_feature (16)..(16): 2'-deoxy-2'-fluoro
  misc_feature (17)..(17): 2'-O-Methyl
  misc_feature (18)..(18): 2'-deoxy-2'-fluoro
  misc_feature (19)..(19): 2'-O-Methyl
  misc_feature (20)..(20): Phosphorothioate 3'-Internucleotide Linkage
  misc_feature (20)..(21): n stands for thymidine
ucugaugaugucagauaugnn

SEQ ID NO: 2566 - RNA, 21 nt, Artificial Sequence
  Description of Artificial Sequence:  siNA antisense region
  misc_feature (1)..(1): 2'-deoxy-2'-fluoro
  misc_feature (2)..(2): 2'-O-methyl
  misc_feature (3)..(3): 2'-deoxy-2'-fluoro
  misc_feature (4)..(4): 2'-O-methyl
  misc_feature (5)..(7): 2'-deoxy-2'-fluoro
  misc_feature (8)..(9): 2'-O-methyl
  misc_feature (10)..(10): 2'-deoxy-2'-fluoro
  misc_feature (11)..(11): 2'-O-methyl
  misc_feature (12)..(13): 2'-deoxy-2'-fluoro
  misc_feature (14)..(14): 2'-O-methyl
  misc_feature (15)..(16): 2'-deoxy-2'-fluoro
  misc_feature (17)..(19): 2'-O-methyl
  misc_feature (20)..(20): Phosphorothioate 3'-Internucleotide Linkage
  misc_feature (20)..(21): n stands for thymidine
  misc_feature (21)..(21): 3'-3 attached terminal glyceryl moeity
cauaucugacaucaucagann

SEQ ID NO: 2567 - RNA, 21 nt, Artificial Sequence
  Description of Artificial Sequence:  siNA sense region
  misc_feature (1)..(1): 5'-3 attached terminal deoxyabasic moeity
  misc_feature (1)..(3): 2'-O-Methyl or 2'-deoxy-2'-fluoro
  misc_feature (6)..(6): 2'-O-Methyl or 2'-deoxy-2'-fluoro
  misc_feature (9)..(9): 2'-O-Methyl or 2'-deoxy-2'-fluoro
  misc_feature (11)..(12): 2'-O-Methyl or 2'-deoxy-2'-fluoro
  misc_feature (16)..(16): 2'-O-Methyl or 2'-deoxy-2'-fluoro
  misc_feature (18)..(18): 2'-O-Methyl or 2'-deoxy-2'-fluoro
  misc_feature (21)..(21): 3'-3 attached terminal deoxyabasic moeity
  misc_feature (20)..(21): n stands for thymidine
ucugaugaugucagauaugnn

SEQ ID NO: 2568 - RNA, 21 nt, Artificial Sequence
  Description of Artificial Sequence:  siNA antisense region
  misc_feature (1)..(1): 2'-deoxy-2'-fluoro
  misc_feature (3)..(3): 2'-deoxy-2'-fluoro
  misc_feature (5)..(7): 2'-deoxy-2'-fluoro
  misc_feature (10)..(10): 2'-deoxy-2'-fluoro
  misc_feature (12)..(13): 2'-deoxy-2'-fluoro
  misc_feature (15)..(16): 2'-deoxy-2'-fluoro
  misc_feature (20)..(20): Phosphorothioate 3'-Internucleotide Linkage
  misc_feature (20)..(21): n stands for thymidine
  misc_feature (21)..(21): 3'-3 attached terminal glyceryl moeity
cauaucugacaucaucagann

SEQ ID NO: 2569 - RNA, 21 nt, Artificial Sequence
  Description of Artificial Sequence:  siNA sense region
  misc_feature (1)..(1): 5'-3 attached terminal deoxyabasic moeity
  misc_feature (1)..(3): 2'-deoxy-2'-fluoro
  misc_feature (4)..(5): 2'-deoxy
  misc_feature (6)..(6): 2'-deoxy-2'-fluoro
  misc_feature (7)..(8): 2'-deoxy
  misc_feature (9)..(9): 2'-deoxy-2'-fluoro
  misc_feature (10)..(10): 2'-deoxy
  misc_feature (11)..(12): 2'-deoxy-2'-fluoro
  misc_feature (13)..(15): 2'-deoxy
  misc_feature (16)..(16): 2'-deoxy-2'-fluoro
  misc_feature (17)..(17): 2'-deoxy
  misc_feature (18)..(18): 2'-deoxy-2'-fluoro
  misc_feature (19)..(19): 2'-deoxy
  misc_feature (20)..(21): n stands for thymidine
  misc_feature (21)..(21): 3'-3 attached terminal deoxyabasic moeity
ucugaugaugucagauaugnn

SEQ ID NO: 2570 - RNA, 21 nt, Artificial Sequence
  Description of Artificial Sequence:  siNA sense region
  misc_feature (1)..(1): 5'-3 attached terminal deoxyabasic moeity
  misc_feature (1)..(3): 2'-deoxy-2'-fluoro
  misc_feature (6)..(6): 2'-deoxy-2'-fluoro
  misc_feature (9)..(9): 2'-deoxy-2'-fluoro
  misc_feature (11)..(12): 2'-deoxy-2'-fluoro
  misc_feature (16)..(16): 2'-deoxy-2'-fluoro
  misc_feature (18)..(18): 2'-deoxy-2'-fluoro
  misc_feature (20)..(21): n stands for thymidine
  misc_feature (21)..(21): 3'-3 attached terminal deoxyabasic moeity
ucugaugaugucagauaugnn

SEQ ID NO: 2571 - RNA, 21 nt, Artificial Sequence
  Description of Artificial Sequence:  siNA antisense region
  misc_feature (1)..(1): 2'-deoxy-2'-fluoro
  misc_feature (2)..(2): 2'-deoxy
  misc_feature (3)..(3): 2'-deoxy-2'-fluoro
  misc_feature (4)..(4): 2'-deoxy
  misc_feature (5)..(7): 2'-deoxy-2'-fluoro
  misc_feature (8)..(9): 2'-deoxy
  misc_feature (10)..(10): 2'-deoxy-2'-fluoro
  misc_feature (11)..(11): 2'-deoxy
  misc_feature (12)..(13): 2'-deoxy-2'-fluoro
  misc_feature (14)..(14): 2'-deoxy
  misc_feature (15)..(16): 2'-deoxy-2'-fluoro
  misc_feature (17)..(19): 2'-deoxy
  misc_feature (20)..(20): Phosphorothioate 3'-Internucleotide Linkage
  misc_feature (21)..(21): 3'-3 attached terminal glyceryl moeity
  misc_feature (20)..(21): n stands for thymidine
cauaucugacaucaucagann

SEQ ID NO: 2572 - RNA, 23 nt, Artificial Sequence
  Description of Artificial Sequence:  target sequence
aucaugcuggacugcuggcacag

SEQ ID NO: 2573 - RNA, 23 nt, Artificial Sequence
  Description of Artificial Sequence:  target sequence
accaugcuggacugcuggcacgg

SEQ ID NO: 2574 - RNA, 23 nt, Artificial Sequence
  Description of Artificial Sequence:  target sequence
aucauguuggauugcuggcacaa

SEQ ID NO: 2575 - RNA, 23 nt, Artificial Sequence
  Description of Artificial Sequence:  target sequence
accaugcuggacugcuggcauga

SEQ ID NO: 2576 - RNA, 23 nt, Artificial Sequence
  Description of Artificial Sequence:  target sequence
aucaugcuggauugcuggcacaa

SEQ ID NO: 2577 - RNA, 23 nt, Artificial Sequence
  Description of Artificial Sequence:  target sequence
accaugcuggauugcuggcauga

SEQ ID NO: 2578 - RNA, 23 nt, Artificial Sequence
  Description of Artificial Sequence:  target sequence
ucaugcuggacugcuggcacaga

SEQ ID NO: 2579 - RNA, 23 nt, Artificial Sequence
  Description of Artificial Sequence:  target sequence
ccaugcuggacugcuggcacggg

SEQ ID NO: 2580 - RNA, 23 nt, Artificial Sequence
  Description of Artificial Sequence:  target sequence
ucauguuggauugcuggcacaaa

SEQ ID NO: 2581 - RNA, 23 nt, Artificial Sequence
  Description of Artificial Sequence:  target sequence
ccaugcuggacugcuggcaugag

SEQ ID NO: 2582 - RNA, 23 nt, Artificial Sequence
  Description of Artificial Sequence:  target sequence
ucaugcuggauugcuggcacaaa

SEQ ID NO: 2583 - RNA, 23 nt, Artificial Sequence
  Description of Artificial Sequence:  target sequence
ccaugcuggauugcuggcaugag

SEQ ID NO: 2584 - RNA, 23 nt, Artificial Sequence
  Description of Artificial Sequence:  target sequence
caugcuggacugcuggcacagag

SEQ ID NO: 2585 - RNA, 23 nt, Artificial Sequence
  Description of Artificial Sequence:  target sequence
caugcuggacugcuggcacgggg

SEQ ID NO: 2586 - RNA, 23 nt, Artificial Sequence
  Description of Artificial Sequence:  target sequence
cauguuggauugcuggcacaaag

SEQ ID NO: 2587 - RNA, 23 nt, Artificial Sequence
  Description of Artificial Sequence:  target sequence
caugcuggacugcuggcaugagg

SEQ ID NO: 2588 - RNA, 23 nt, Artificial Sequence
  Description of Artificial Sequence:  target sequence
caugcuggauugcuggcacaaag

SEQ ID NO: 2589 - RNA, 23 nt, Artificial Sequence
  Description of Artificial Sequence:  target sequence
caugcuggauugcuggcaugagg

SEQ ID NO: 2590 - RNA, 23 nt, Artificial Sequence
  Description of Artificial Sequence:  target sequence
ugccuuaugaugccagcaaaugg

SEQ ID NO: 2591 - RNA, 23 nt, Artificial Sequence
  Description of Artificial Sequence:  target sequence
ucccuuaugaugccagcaagugg

SEQ ID NO: 2592 - RNA, 23 nt, Artificial Sequence
  Description of Artificial Sequence:  target sequence
ugcccuaugaugccagcaagugg

SEQ ID NO: 2593 - RNA, 23 nt, Artificial Sequence
  Description of Artificial Sequence:  target sequence
ugccuuaugaugccagcaagugg

SEQ ID NO: 2594 - RNA, 23 nt, Artificial Sequence
  Description of Artificial Sequence:  target sequence
ugcccuaugaugccagcaagugg

SEQ ID NO: 2595 - RNA, 23 nt, Artificial Sequence
  Description of Artificial Sequence:  target sequence
ugccuuaugaugccagcaagugg

SEQ ID NO: 2596 - RNA, 23 nt, Artificial Sequence
  Description of Artificial Sequence:  target sequence
gccuuaugaugccagcaaauggg

SEQ ID NO: 2597 - RNA, 23 nt, Artificial Sequence
  Description of Artificial Sequence:  target sequence
cccuuaugaugccagcaaguggg

SEQ ID NO: 2598 - RNA, 23 nt, Artificial Sequence
  Description of Artificial Sequence:  target sequence
gcccuaugaugccagcaaguggg

SEQ ID NO: 2599 - RNA, 23 nt, Artificial Sequence
  Description of Artificial Sequence:  target sequence
gccuuaugaugccagcaaguggg

SEQ ID NO: 2600 - RNA, 23 nt, Artificial Sequence
  Description of Artificial Sequence:  target sequence
gcccuaugaugccagcaaguggg

SEQ ID NO: 2601 - RNA, 23 nt, Artificial Sequence
  Description of Artificial Sequence:  target sequence
gccuuaugaugccagcaaguggg

SEQ ID NO: 2602 - RNA, 23 nt, Artificial Sequence
  Description of Artificial Sequence:  target sequence
ccuuaugaugccagcaaauggga

SEQ ID NO: 2603 - RNA, 23 nt, Artificial Sequence
  Description of Artificial Sequence:  target sequence
ccuuaugaugccagcaaguggga

SEQ ID NO: 2604 - RNA, 23 nt, Artificial Sequence
  Description of Artificial Sequence:  target sequence
cccuaugaugccagcaaguggga

SEQ ID NO: 2605 - RNA, 23 nt, Artificial Sequence
  Description of Artificial Sequence:  target sequence
ccuuaugaugccagcaaguggga

SEQ ID NO: 2606 - RNA, 23 nt, Artificial Sequence
  Description of Artificial Sequence:  target sequence
cccuaugaugccagcaaguggga

SEQ ID NO: 2607 - RNA, 23 nt, Artificial Sequence
  Description of Artificial Sequence:  target sequence
ccuuaugaugccagcaaguggga

SEQ ID NO: 2608 - RNA, 23 nt, Artificial Sequence
  Description of Artificial Sequence:  target sequence
cuuaugaugccagcaaaugggaa

SEQ ID NO: 2609 - RNA, 23 nt, Artificial Sequence
  Description of Artificial Sequence:  target sequence
cuuaugaugccagcaagugggag

SEQ ID NO: 2610 - RNA, 23 nt, Artificial Sequence
  Description of Artificial Sequence:  target sequence
ccuaugaugccagcaagugggag

SEQ ID NO: 2611 - RNA, 23 nt, Artificial Sequence
  Description of Artificial Sequence:  target sequence
cuuaugaugccagcaagugggaa

SEQ ID NO: 2612 - RNA, 23 nt, Artificial Sequence
  Description of Artificial Sequence:  target sequence
ccuaugaugccagcaagugggag

SEQ ID NO: 2613 - RNA, 23 nt, Artificial Sequence
  Description of Artificial Sequence:  target sequence
cuuaugaugccagcaagugggag

SEQ ID NO: 2614 - RNA, 23 nt, Artificial Sequence
  Description of Artificial Sequence:  target sequence
uuaugaugccagcaaaugggaau

SEQ ID NO: 2615 - RNA, 23 nt, Artificial Sequence
  Description of Artificial Sequence:  target sequence
uuaugaugccagcaagugggagu

SEQ ID NO: 2616 - RNA, 23 nt, Artificial Sequence
  Description of Artificial Sequence:  target sequence
cuaugaugccagcaagugggagu

SEQ ID NO: 2617 - RNA, 23 nt, Artificial Sequence
  Description of Artificial Sequence:  target sequence
uuaugaugccagcaagugggaau

SEQ ID NO: 2618 - RNA, 23 nt, Artificial Sequence
  Description of Artificial Sequence:  target sequence
cuaugaugccagcaagugggagu

SEQ ID NO: 2619 - RNA, 23 nt, Artificial Sequence
  Description of Artificial Sequence:  target sequence
uuaugaugccagcaagugggagu

SEQ ID NO: 2620 - RNA, 23 nt, Artificial Sequence
  Description of Artificial Sequence:  target sequence
accagaccaugcuggacugcugg

SEQ ID NO: 2621 - RNA, 23 nt, Artificial Sequence
  Description of Artificial Sequence:  target sequence
aucagaucaugcuggacugcugg

SEQ ID NO: 2622 - RNA, 23 nt, Artificial Sequence
  Description of Artificial Sequence:  target sequence
accaaaucauguuggauugcugg

SEQ ID NO: 2623 - RNA, 23 nt, Artificial Sequence
  Description of Artificial Sequence:  target sequence
accagaccaugcuggacugcugg

SEQ ID NO: 2624 - RNA, 23 nt, Artificial Sequence
  Description of Artificial Sequence:  target sequence
accaaaucaugcuggauugcugg

SEQ ID NO: 2625 - RNA, 23 nt, Artificial Sequence
  Description of Artificial Sequence:  target sequence
accaaaccaugcuggauugcugg

SEQ ID NO: 2626 - RNA, 23 nt, Artificial Sequence
  Description of Artificial Sequence:  target sequence
ccagaccaugcuggacugcuggc

SEQ ID NO: 2627 - RNA, 23 nt, Artificial Sequence
  Description of Artificial Sequence:  target sequence
ucagaucaugcuggacugcuggc

SEQ ID NO: 2628 - RNA, 23 nt, Artificial Sequence
  Description of Artificial Sequence:  target sequence
ccaaaucauguuggauugcuggc

SEQ ID NO: 2629 - RNA, 23 nt, Artificial Sequence
  Description of Artificial Sequence:  target sequence
ccagaccaugcuggacugcuggc

SEQ ID NO: 2630 - RNA, 23 nt, Artificial Sequence
  Description of Artificial Sequence:  target sequence
ccaaaucaugcuggauugcuggc

SEQ ID NO: 2631 - RNA, 23 nt, Artificial Sequence
  Description of Artificial Sequence:  target sequence
ccaaaccaugcuggauugcuggc

SEQ ID NO: 2632 - RNA, 23 nt, Artificial Sequence
  Description of Artificial Sequence:  target sequence
cagaccaugcuggacugcuggca

SEQ ID NO: 2633 - RNA, 23 nt, Artificial Sequence
  Description of Artificial Sequence:  target sequence
cagaucaugcuggacugcuggca

SEQ ID NO: 2634 - RNA, 23 nt, Artificial Sequence
  Description of Artificial Sequence:  target sequence
caaaucauguuggauugcuggca

SEQ ID NO: 2635 - RNA, 23 nt, Artificial Sequence
  Description of Artificial Sequence:  target sequence
cagaccaugcuggacugcuggca

SEQ ID NO: 2636 - RNA, 23 nt, Artificial Sequence
  Description of Artificial Sequence:  target sequence
caaaucaugcuggauugcuggca

SEQ ID NO: 2637 - RNA, 23 nt, Artificial Sequence
  Description of Artificial Sequence:  target sequence
caaaccaugcuggauugcuggca

SEQ ID NO: 2638 - RNA, 23 nt, Artificial Sequence
  Description of Artificial Sequence:  target sequence
agaccaugcuggacugcuggcac

SEQ ID NO: 2639 - RNA, 23 nt, Artificial Sequence
  Description of Artificial Sequence:  target sequence
agaucaugcuggacugcuggcac

SEQ ID NO: 2640 - RNA, 23 nt, Artificial Sequence
  Description of Artificial Sequence:  target sequence
aaaucauguuggauugcuggcac

SEQ ID NO: 2641 - RNA, 23 nt, Artificial Sequence
  Description of Artificial Sequence:  target sequence
agaccaugcuggacugcuggcau

SEQ ID NO: 2642 - RNA, 23 nt, Artificial Sequence
  Description of Artificial Sequence:  target sequence
aaaucaugcuggauugcuggcac

SEQ ID NO: 2643 - RNA, 23 nt, Artificial Sequence
  Description of Artificial Sequence:  target sequence
aaaccaugcuggauugcuggcau

SEQ ID NO: 2644 - RNA, 23 nt, Artificial Sequence
  Description of Artificial Sequence:  target sequence
gaccaugcuggacugcuggcacg

SEQ ID NO: 2645 - RNA, 23 nt, Artificial Sequence
  Description of Artificial Sequence:  target sequence
gaucaugcuggacugcuggcaca

SEQ ID NO: 2646 - RNA, 23 nt, Artificial Sequence
  Description of Artificial Sequence:  target sequence
aaucauguuggauugcuggcaca

SEQ ID NO: 2647 - RNA, 23 nt, Artificial Sequence
  Description of Artificial Sequence:  target sequence
gaccaugcuggacugcuggcaug

SEQ ID NO: 2648 - RNA, 23 nt, Artificial Sequence
  Description of Artificial Sequence:  target sequence
aaucaugcuggauugcuggcaca

SEQ ID NO: 2649 - RNA, 23 nt, Artificial Sequence
  Description of Artificial Sequence:  target sequence
aaccaugcuggauugcuggcaug

SEQ ID NO: 2650 - RNA, 23 nt, Artificial Sequence
  Description of Artificial Sequence:  target sequence
agcaggauggcaaagacuacauu

SEQ ID NO: 2651 - RNA, 23 nt, Artificial Sequence
  Description of Artificial Sequence:  target sequence
aacaggaugguaaagacuacauc

SEQ ID NO: 2652 - RNA, 23 nt, Artificial Sequence
  Description of Artificial Sequence:  target sequence
aacaggaugggaaagauuacauc

SEQ ID NO: 2653 - RNA, 23 nt, Artificial Sequence
  Description of Artificial Sequence:  target sequence
agcaggauggcaaagacuauauu

SEQ ID NO: 2654 - RNA, 23 nt, Artificial Sequence
  Description of Artificial Sequence:  target sequence
aacaggaugguaaagacuacauc

SEQ ID NO: 2655 - RNA, 23 nt, Artificial Sequence
  Description of Artificial Sequence:  target sequence
agcaggauggcaaagacuauauu

SEQ ID NO: 2656 - RNA, 23 nt, Artificial Sequence
  Description of Artificial Sequence:  target sequence
gcaggauggcaaagacuacauug

SEQ ID NO: 2657 - RNA, 23 nt, Artificial Sequence
  Description of Artificial Sequence:  target sequence
acaggaugguaaagacuacaucc

SEQ ID NO: 2658 - RNA, 23 nt, Artificial Sequence
  Description of Artificial Sequence:  target sequence
acaggaugggaaagauuacaucc

SEQ ID NO: 2659 - RNA, 23 nt, Artificial Sequence
  Description of Artificial Sequence:  target sequence
gcaggauggcaaagacuauauug

SEQ ID NO: 2660 - RNA, 23 nt, Artificial Sequence
  Description of Artificial Sequence:  target sequence
acaggaugguaaagacuacaucc

SEQ ID NO: 2661 - RNA, 23 nt, Artificial Sequence
  Description of Artificial Sequence:  target sequence
gcaggauggcaaagacuauauug

SEQ ID NO: 2662 - RNA, 19 nt, Artificial Sequence
  Description of Artificial Sequence:  target sequence
caugcuggacugcuggcac

SEQ ID NO: 2663 - RNA, 19 nt, Artificial Sequence
  Description of Artificial Sequence:  target sequence
caugcuggacugcuggcac

SEQ ID NO: 2664 - RNA, 19 nt, Artificial Sequence
  Description of Artificial Sequence:  target sequence
cauguuggauugcuggcac

SEQ ID NO: 2665 - RNA, 19 nt, Artificial Sequence
  Description of Artificial Sequence:  target sequence
caugcuggacugcuggcau

SEQ ID NO: 2666 - RNA, 19 nt, Artificial Sequence
  Description of Artificial Sequence:  target sequence
caugcuggauugcuggcac

SEQ ID NO: 2667 - RNA, 19 nt, Artificial Sequence
  Description of Artificial Sequence:  target sequence
caugcuggauugcuggcau

SEQ ID NO: 2668 - RNA, 19 nt, Artificial Sequence
  Description of Artificial Sequence:  target sequence
augcuggacugcuggcaca

SEQ ID NO: 2669 - RNA, 19 nt, Artificial Sequence
  Description of Artificial Sequence:  target sequence
augcuggacugcuggcacg

SEQ ID NO: 2670 - RNA, 19 nt, Artificial Sequence
  Description of Artificial Sequence:  target sequence
auguuggauugcuggcaca

SEQ ID NO: 2671 - RNA, 19 nt, Artificial Sequence
  Description of Artificial Sequence:  target sequence
augcuggacugcuggcaug

SEQ ID NO: 2672 - RNA, 19 nt, Artificial Sequence
  Description of Artificial Sequence:  target sequence
augcuggauugcuggcaca

SEQ ID NO: 2673 - RNA, 19 nt, Artificial Sequence
  Description of Artificial Sequence:  target sequence
augcuggauugcuggcaug

SEQ ID NO: 2674 - RNA, 19 nt, Artificial Sequence
  Description of Artificial Sequence:  target sequence
ugcuggacugcuggcacag

SEQ ID NO: 2675 - RNA, 19 nt, Artificial Sequence
  Description of Artificial Sequence:  target sequence
ugcuggacugcuggcacgg

SEQ ID NO: 2676 - RNA, 19 nt, Artificial Sequence
  Description of Artificial Sequence:  target sequence
uguuggauugcuggcacaa

SEQ ID NO: 2677 - RNA, 19 nt, Artificial Sequence
  Description of Artificial Sequence:  target sequence
ugcuggacugcuggcauga

SEQ ID NO: 2678 - RNA, 19 nt, Artificial Sequence
  Description of Artificial Sequence:  target sequence
ugcuggauugcuggcacaa

SEQ ID NO: 2679 - RNA, 19 nt, Artificial Sequence
  Description of Artificial Sequence:  target sequence
ugcuggauugcuggcauga

SEQ ID NO: 2680 - RNA, 19 nt, Artificial Sequence
  Description of Artificial Sequence:  target sequence
ccuuaugaugccagcaaau

SEQ ID NO: 2681 - RNA, 19 nt, Artificial Sequence
  Description of Artificial Sequence:  target sequence
ccuuaugaugccagcaagu

SEQ ID NO: 2682 - RNA, 19 nt, Artificial Sequence
  Description of Artificial Sequence:  target sequence
cccuaugaugccagcaagu

SEQ ID NO: 2683 - RNA, 19 nt, Artificial Sequence
  Description of Artificial Sequence:  target sequence
ccuuaugaugccagcaagu

SEQ ID NO: 2684 - RNA, 19 nt, Artificial Sequence
  Description of Artificial Sequence:  target sequence
cccuaugaugccagcaagu

SEQ ID NO: 2685 - RNA, 19 nt, Artificial Sequence
  Description of Artificial Sequence:  target sequence
ccuuaugaugccagcaagu

SEQ ID NO: 2686 - RNA, 19 nt, Artificial Sequence
  Description of Artificial Sequence:  target sequence
cuuaugaugccagcaaaug

SEQ ID NO: 2687 - RNA, 19 nt, Artificial Sequence
  Description of Artificial Sequence:  target sequence
cuuaugaugccagcaagug

SEQ ID NO: 2688 - RNA, 19 nt, Artificial Sequence
  Description of Artificial Sequence:  target sequence
ccuaugaugccagcaagug

SEQ ID NO: 2689 - RNA, 19 nt, Artificial Sequence
  Description of Artificial Sequence:  target sequence
cuuaugaugccagcaagug

SEQ ID NO: 2690 - RNA, 19 nt, Artificial Sequence
  Description of Artificial Sequence:  target sequence
ccuaugaugccagcaagug

SEQ ID NO: 2691 - RNA, 19 nt, Artificial Sequence
  Description of Artificial Sequence:  target sequence
cuuaugaugccagcaagug

SEQ ID NO: 2692 - RNA, 19 nt, Artificial Sequence
  Description of Artificial Sequence:  target sequence
uuaugaugccagcaaaugg

SEQ ID NO: 2693 - RNA, 19 nt, Artificial Sequence
  Description of Artificial Sequence:  target sequence
uuaugaugccagcaagugg

SEQ ID NO: 2694 - RNA, 19 nt, Artificial Sequence
  Description of Artificial Sequence:  target sequence
cuaugaugccagcaagugg

SEQ ID NO: 2695 - RNA, 19 nt, Artificial Sequence
  Description of Artificial Sequence:  target sequence
uuaugaugccagcaagugg

SEQ ID NO: 2696 - RNA, 19 nt, Artificial Sequence
  Description of Artificial Sequence:  target sequence
cuaugaugccagcaagugg

SEQ ID NO: 2697 - RNA, 19 nt, Artificial Sequence
  Description of Artificial Sequence:  target sequence
uuaugaugccagcaagugg

SEQ ID NO: 2698 - RNA, 19 nt, Artificial Sequence
  Description of Artificial Sequence:  target sequence
uaugaugccagcaaauggg

SEQ ID NO: 2699 - RNA, 19 nt, Artificial Sequence
  Description of Artificial Sequence:  target sequence
uaugaugccagcaaguggg

SEQ ID NO: 2700 - RNA, 19 nt, Artificial Sequence
  Description of Artificial Sequence:  target sequence
uaugaugccagcaaguggg

SEQ ID NO: 2701 - RNA, 19 nt, Artificial Sequence
  Description of Artificial Sequence:  target sequence
uaugaugccagcaaguggg

SEQ ID NO: 2702 - RNA, 19 nt, Artificial Sequence
  Description of Artificial Sequence:  target sequence
uaugaugccagcaaguggg

SEQ ID NO: 2703 - RNA, 19 nt, Artificial Sequence
  Description of Artificial Sequence:  target sequence
uaugaugccagcaaguggg

SEQ ID NO: 2704 - RNA, 19 nt, Artificial Sequence
  Description of Artificial Sequence:  target sequence
augaugccagcaaauggga

SEQ ID NO: 2705 - RNA, 19 nt, Artificial Sequence
  Description of Artificial Sequence:  target sequence
augaugccagcaaguggga

SEQ ID NO: 2706 - RNA, 19 nt, Artificial Sequence
  Description of Artificial Sequence:  target sequence
augaugccagcaaguggga

SEQ ID NO: 2707 - RNA, 19 nt, Artificial Sequence
  Description of Artificial Sequence:  target sequence
augaugccagcaaguggga

SEQ ID NO: 2708 - RNA, 19 nt, Artificial Sequence
  Description of Artificial Sequence:  target sequence
augaugccagcaaguggga

SEQ ID NO: 2709 - RNA, 19 nt, Artificial Sequence
  Description of Artificial Sequence:  target sequence
augaugccagcaaguggga

SEQ ID NO: 2710 - RNA, 19 nt, Artificial Sequence
  Description of Artificial Sequence:  target sequence
cagaccaugcuggacugcu

SEQ ID NO: 2711 - RNA, 19 nt, Artificial Sequence
  Description of Artificial Sequence:  target sequence
cagaucaugcuggacugcu

SEQ ID NO: 2712 - RNA, 19 nt, Artificial Sequence
  Description of Artificial Sequence:  target sequence
caaaucauguuggauugcu

SEQ ID NO: 2713 - RNA, 19 nt, Artificial Sequence
  Description of Artificial Sequence:  target sequence
cagaccaugcuggacugcu

SEQ ID NO: 2714 - RNA, 19 nt, Artificial Sequence
  Description of Artificial Sequence:  target sequence
caaaucaugcuggauugcu

SEQ ID NO: 2715 - RNA, 19 nt, Artificial Sequence
  Description of Artificial Sequence:  target sequence
caaaccaugcuggauugcu

SEQ ID NO: 2716 - RNA, 19 nt, Artificial Sequence
  Description of Artificial Sequence:  target sequence
agaccaugcuggacugcug

SEQ ID NO: 2717 - RNA, 19 nt, Artificial Sequence
  Description of Artificial Sequence:  target sequence
agaucaugcuggacugcug

SEQ ID NO: 2718 - RNA, 19 nt, Artificial Sequence
  Description of Artificial Sequence:  target sequence
aaaucauguuggauugcug

SEQ ID NO: 2719 - RNA, 19 nt, Artificial Sequence
  Description of Artificial Sequence:  target sequence
agaccaugcuggacugcug

SEQ ID NO: 2720 - RNA, 19 nt, Artificial Sequence
  Description of Artificial Sequence:  target sequence
aaaucaugcuggauugcug

SEQ ID NO: 2721 - RNA, 19 nt, Artificial Sequence
  Description of Artificial Sequence:  target sequence
aaaccaugcuggauugcug

SEQ ID NO: 2722 - RNA, 19 nt, Artificial Sequence
  Description of Artificial Sequence:  target sequence
gaccaugcuggacugcugg

SEQ ID NO: 2723 - RNA, 19 nt, Artificial Sequence
  Description of Artificial Sequence:  target sequence
gaucaugcuggacugcugg

SEQ ID NO: 2724 - RNA, 19 nt, Artificial Sequence
  Description of Artificial Sequence:  target sequence
aaucauguuggauugcugg

SEQ ID NO: 2725 - RNA, 19 nt, Artificial Sequence
  Description of Artificial Sequence:  target sequence
gaccaugcuggacugcugg

SEQ ID NO: 2726 - RNA, 19 nt, Artificial Sequence
  Description of Artificial Sequence:  target sequence
aaucaugcuggauugcugg

SEQ ID NO: 2727 - RNA, 19 nt, Artificial Sequence
  Description of Artificial Sequence:  target sequence
aaccaugcuggauugcugg

SEQ ID NO: 2728 - RNA, 19 nt, Artificial Sequence
  Description of Artificial Sequence:  target sequence
accaugcuggacugcuggc

SEQ ID NO: 2729 - RNA, 19 nt, Artificial Sequence
  Description of Artificial Sequence:  target sequence
aucaugcuggacugcuggc

SEQ ID NO: 2730 - RNA, 19 nt, Artificial Sequence
  Description of Artificial Sequence:  target sequence
aucauguuggauugcuggc

SEQ ID NO: 2731 - RNA, 19 nt, Artificial Sequence
  Description of Artificial Sequence:  target sequence
accaugcuggacugcuggc

SEQ ID NO: 2732 - RNA, 19 nt, Artificial Sequence
  Description of Artificial Sequence:  target sequence
aucaugcuggauugcuggc

SEQ ID NO: 2733 - RNA, 19 nt, Artificial Sequence
  Description of Artificial Sequence:  target sequence
accaugcuggauugcuggc

SEQ ID NO: 2734 - RNA, 19 nt, Artificial Sequence
  Description of Artificial Sequence:  target sequence
ccaugcuggacugcuggca

SEQ ID NO: 2735 - RNA, 19 nt, Artificial Sequence
  Description of Artificial Sequence:  target sequence
ucaugcuggacugcuggca

SEQ ID NO: 2736 - RNA, 19 nt, Artificial Sequence
  Description of Artificial Sequence:  target sequence
ucauguuggauugcuggca

SEQ ID NO: 2737 - RNA, 19 nt, Artificial Sequence
  Description of Artificial Sequence:  target sequence
ccaugcuggacugcuggca

SEQ ID NO: 2738 - RNA, 19 nt, Artificial Sequence
  Description of Artificial Sequence:  target sequence
ucaugcuggauugcuggca

SEQ ID NO: 2739 - RNA, 19 nt, Artificial Sequence
  Description of Artificial Sequence:  target sequence
ccaugcuggauugcuggca

SEQ ID NO: 2740 - RNA, 19 nt, Artificial Sequence
  Description of Artificial Sequence:  target sequence
caggauggcaaagacuaca

SEQ ID NO: 2741 - RNA, 19 nt, Artificial Sequence
  Description of Artificial Sequence:  target sequence
caggaugguaaagacuaca

SEQ ID NO: 2742 - RNA, 19 nt, Artificial Sequence
  Description of Artificial Sequence:  target sequence
caggaugggaaagauuaca

SEQ ID NO: 2743 - RNA, 19 nt, Artificial Sequence
  Description of Artificial Sequence:  target sequence
caggauggcaaagacuaua

SEQ ID NO: 2744 - RNA, 19 nt, Artificial Sequence
  Description of Artificial Sequence:  target sequence
caggaugguaaagacuaca

SEQ ID NO: 2745 - RNA, 19 nt, Artificial Sequence
  Description of Artificial Sequence:  target sequence
caggauggcaaagacuaua

SEQ ID NO: 2746 - RNA, 19 nt, Artificial Sequence
  Description of Artificial Sequence:  target sequence
aggauggcaaagacuacau

SEQ ID NO: 2747 - RNA, 19 nt, Artificial Sequence
  Description of Artificial Sequence:  target sequence
aggaugguaaagacuacau

SEQ ID NO: 2748 - RNA, 19 nt, Artificial Sequence
  Description of Artificial Sequence:  target sequence
aggaugggaaagauuacau

SEQ ID NO: 2749 - RNA, 19 nt, Artificial Sequence
  Description of Artificial Sequence:  target sequence
aggauggcaaagacuauau

SEQ ID NO: 2750 - RNA, 19 nt, Artificial Sequence
  Description of Artificial Sequence:  target sequence
aggaugguaaagacuacau

SEQ ID NO: 2751 - RNA, 19 nt, Artificial Sequence
  Description of Artificial Sequence:  target sequence
aggauggcaaagacuauau

1. A double-stranded short interfering nucleic acid (siNA) molecule comprising about 19 to about 21 base pairs, wherein said siNA comprises nucleotide sequence complementary to nucleic acid sequence encoding vascular endothelial growth factor receptor 1 (VEGFr1) and vascular endothelial growth factor receptor 2 (VEGFr2) or a portion thereof, and wherein said siNA down-regulates either VEGFr1 or VEGFr2 gene expression or both VEGFr1 and VEGFr2 gene expression.

2. The siNA molecule of claim 1, wherein said siNA molecule comprises no ribonucleotides.

3. The siNA molecule of claim 1, wherein said siNA molecule comprises ribonucleotides.

4. The siNA molecule of claim 1, wherein one of the strands of said double-stranded siNA molecule comprises a nucleotide sequence that is complementary to a nucleotide sequence present in both VEGFr1 and VEGFR2 encoded RNAs or a portion thereof, and wherein the second strand of said double-stranded siNA molecule comprises a nucleotide sequence substantially similar to the nucleotide sequence of said VEGFr1 and VEGFR2 encoded RNAs or a portion thereof.

5. The siNA molecule of claim 4, wherein each said strand of the siNA molecule comprises about 19 to about 23 nucleotides, and wherein each said strand comprises at least about 19 nucleotides that are complementary to the nucleotides of the other strand.

6. The siNA molecule of claim 1, wherein said siNA molecule comprises an antisense region and a sense region, wherein said antisense region comprises a nucleotide sequence that is complementary to a nucleotide sequence present in both VEGFr1 and VEGFR2 encoded RNAs or a portion thereof, and wherein said sense region comprises a nucleotide sequence substantially similar to the nucleotide sequence present in both VEGFr1 and VEGFR2 encoded RNAs or a portion thereof.

7. The siNA molecule of claim 6, wherein said antisense region and said sense region each comprise about 19 to about 23 nucleotides, and wherein said antisense region comprises at least about 19 nucleotides that are complementary to nucleotides of the sense region.

8. The siNA molecule of claim 1, wherein said siNA molecule comprises a sense region and an antisense region and wherein said antisense region comprises a nucleotide sequence that is complementary to a nucleotide sequence or a portion thereof of RNA encoded by a VEGFr1 and VEGFR2 gene and said sense region comprises a nucleotide sequence that is complementary to said antisense region.

9. The siNA molecule of claim 6, wherein said siNA molecule is assembled from two separate oligonucleotide fragments wherein one fragment comprises the sense region and the second fragment comprises the antisense region of said siNA molecule.

10. The siNA molecule of claim claim 6, wherein said sense region is connected to the antisense region via a linker molecule.

11. The siNA molecule of claim 10, wherein said linker molecule is a polynucleotide linker.

12. The siNA molecule of claim 10, wherein said linker molecule is a non-nucleotide linker.

13. The siNA molecule of claim 6, wherein pyrimidine nucleotides in the sense region are 2′-O-methylpyrimidine nucleotides.

14. The siNA molecule of claim 6, wherein purine nucleotides in the sense region are 2′-deoxy purine nucleotides.

15. The siNA molecule of claim 6, wherein the pyrimidine nucleotides present in the sense region are 2′-deoxy-2′-fluoro pyrimidine nucleotides.

16. The siNA molecule of claim 9, wherein the fragment comprising said sense region includes a terminal cap moiety at the 5′-end, the 3′-end, or both of the 5′ and 3′ ends of the fragment comprising said sense region.

17. The siNA molecule of claim 16, wherein said terminal cap moiety is an inverted deoxy abasic moiety.

18. The siNA molecule of claim 6, wherein the pyrimidine nucleotides of said antisense region are 2′-deoxy-2′-fluoro pyrimidine nucleotides

19. The siNA molecule of claim 6, wherein the purine nucleotides of said antisense region are 2′-O-methyl purine nucleotides.

20. The siNA molecule of claim 6, wherein the purine nucleotides present in said antisense region comprise 2′-deoxy-purine nucleotides.

21. The siNA molecule of claim 18, wherein said antisense region comprises a phosphorothioate internucleotide linkage at the 3′ end of said antisense region.

22. The siNA molecule of claim 6, wherein said antisense region comprises a terminal cap moiety at the 3′ end of said antisense region.

23. The siNA molecule of claim 22, wherein said terminal cap comprises an inverted deoxyabasic moiety.

24. The siNA molecule of claim 22, wherein said terminal cap comprises a glyceryl moiety.

25. The siNA molecule of claim 9, wherein each of the two fragments of said siNA molecule comprise 21 nucleotides.

26. The siNA molecule of claim 25, wherein about 19 nucleotides of each fragment of the siNA molecule are base-paired to the complementary nucleotides of the other fragment of the siNA molecule and wherein at least two 3′ terminal nucleotides of each fragment of the siNA molecule are not base-paired to the nucleotides of the other fragment of the siNA molecule.

27. The siNA molecule of claim 26, wherein each of the two 3′ terminal nucleotides of each fragment of the siNA molecule are 2′-deoxy-pyrimidines.

28. The siNA molecule of claim 27, wherein said 2′-deoxy-pyrimidine is 2′-deoxy-thymidine.

29. The siNA molecule of claim 25, wherein all 21 nucleotides of each fragment of the siNA molecule are base-paired to the complementary nucleotides of the other fragment of the siNA molecule.

30. The siNA molecule of claim 25, wherein about 19 nucleotides of the antisense region are base-paired to the nucleotide sequence of the RNA encoded by a VEGFr1 and VEGFr2 gene or a portion thereof.

31. The siNA molecule of claim 25, wherein 21 nucleotides of the antisense region are base-paired to the nucleotide sequence of the RNA encoded by a VEGFr1 and VEGFr2 gene or a portion thereof.

32. The siNA molecule of claim 9, wherein the 5′-end of the fragment comprising said antisense region optionally includes a phosphate group.

33. A double-stranded short interfering nucleic acid (siNA) molecule that inhibits the expression of a VEGFr1 and a VEGFr2 gene, wherein said siNA molecule comprises no ribonucleotides and wherein each strand of said double-stranded siNA molecule comprises about 21 nucleotides.

34. A double-stranded short interfering nucleic acid (siNA) molecule that inhibits the expression of a VEGFr1 and a VEGFr2 gene, wherein said siNA molecule does not require the presence of a ribonucleotide within the siNA molecule for inhibition of VEGFr1 and VEGFr2 gene expression and wherein each strand of said double-stranded siNA molecule comprises about 21 nucleotides.

35. A pharmaceutical composition comprising the siNA molecule of claim 1 in an acceptable carrier or diluent.
